(19) United States
(12) Patent Application Publication
(10) Pub. No.: US 2023/0407324 A1
(43) Pub. Date: Dec. 21, 2023

(54) DOUBLED HAPLOID INDUCER

(71) Applicant: PIONEER HI-BRED INTERNATIONAL, INC., JOHNSTON, IA (US)

(72) Inventors: JON AARON TUCKER REINDERS, CLIVE, IA (US); MARK E. WILLIAMS, JOHNSTON, IA (US); HUAXUN YE, JOHNSTON, IA (US)

(73) Assignee: PIONEER HI-BRED INTERNATIONAL, INC., JOHNSTON, IA (US)

(21) Appl. No.: 18/249,891

(22) PCT Filed: Oct. 20, 2021
(86) PCT No.: PCT/US21/71946

§ 371 Date: Apr. 20, 2023

Related U.S. Application Data
(60) Provisional application No. 63/094,830, filed on Oct. 21, 2020.

(51) Int. Cl. C12N 15/82; A01H 1/08

(52) U.S. Cl. CPC C12N 15/8261; C12N 15/8201; A01H 1/08

(57) ABSTRACT

Methods of creating doubled haploid inducers are provided. These doubled haploid inducers are used in the production of maternal doubled haploids.

### CROSS-REFERENCE TO RELATED APPLICATIONS

[0001] This application claims priority to U.S. Provisional Application No. 63/094,830, filed Oct. 21, 2020, which is hereby incorporated herein by reference in its entirety.

### FIELD

[0002] The present disclosure relates to the field of plant molecular biology and plant breeding.

### REFERENCE TO SEQUENCE LISTING SUBMITTED ELECTRONICALLY

[0003] The official copy of the sequence listing is submitted electronically via EFS-Web as an ASCII formatted sequence listing with a file named 20211010_8536-WO-PCT_ST25 created on Oct. 10, 2021 and having a size of 1,131,526 bytes and is filed concurrently with the specification. The sequence listing contained in this ASCII formatted document is part of the specification and is herein incorporated by reference in its entirety.

### BACKGROUND OF THE DISCLOSURE

[0004] Plant breeding programs identify new cultivars by screening numerous plants to identify individuals with desirable characteristics. Large numbers of progeny from crosses are typically grown and evaluated, ideally across multiple years and environments, to select the plants with the most desirable characteristics.

[0005] Typical breeding methods cross two parental plants and the filial 1 hybrid (F₁ hybrid), is the first filial generation. Hybrid vigor in a commercial F₁ hybrid is observed when two parental strains, (typically inbreds), from different heterotic groups are intercrossed. Hybrid vigor, the improved or increased function of any biological quality resulting from combining the genetic contributions of its parents, is important to commercial maize seed production. Commercial hybrid performance improvements require continued development of new inbred parental lines.

[0006] Maize inbred line development methods may use maternal (gynogenic) doubled haploid production, in which maternal haploid embryos are selected following the fertilization of the ear of a plant resultant from a first-generation cross that has been fertilized with pollen from a so-called “haploid inducer” line. Pollination of a female flower with pollen of a haploid inducer line (pollen donor) results in elevated levels of ovules that contain only the haploid (1n) maternal genome, as opposed to inheriting a copy of both the maternal and paternal genome, thus, creating maternal haploid embryos. Ovules within the female flower are the products of meiosis and each maternal ovule is a unique meiotically recombined haploid genome, thereby allowing immature maternal haploid embryos to be isolated and treated using in vitro tissue culture methods that include chromosome doubling treatments to rapidly enable generating maternal doubled haploid (2n) recombinant populations comprising paired maternal chromosomes. Many of the maize maternal haploid embryos generated by fertilizing a target plant with pollen from a maize haploid inducer line fail to regenerate into a fertile, doubled haploid plant and few, if any, in vitro tissue culture and plantlet regeneration methods propagate multiple, fertile plants from one haploid embryo. In addition, maternal haploid embryos produce a mixoploid plant having a mixture of haploid, diploid and/or polyploid cells that produce low amounts of seed. This mixoploidy hinders initial phenotypic evaluations of these plants. Further, the isolation of maternal haploid embryos is labor intensive and time-consuming. Some chemical doubling agents are harmful to mammalian cells at certain concentrations. Thus, there is a need for improving methods of producing doubled haploid plants from maternal gamete doubled haploids in maize.

[0007] Plant breeders would thus also benefit from methods of developing a population of recombinant inbred lines that do not require extensive pollination control methods or the prolonged time required for propagating self-fertilized lines into isogenic states.

### SUMMARY OF THE DISCLOSURE

[0008] The present disclosure provides a method of producing a doubled haploid plant, comprising a) providing a first plant, wherein the first plant comprises at least one introduced genetic chromosome doubling agent; b) crossing the first plant with a second plant, wherein the at least one introduced genetic chromosome doubling agent of the first plant induces chromosome doubling of a fertilized egg cell of the second plant in the absence of an exogenously applied chemical or biochemical chromosome doubling agent; c) obtaining a diploidized embryo comprising a pair of chromosomes inherited from the second plant and not comprising the introduced genetic chromosome doubling agent; and d) regenerating a diploid plant from the diploidized embryo. In an aspect, the first plant is a haploid inducer. In an aspect, the haploid inducer comprises a loss-of-function mutation in a patatin-like phospholipase A2α gene. In an aspect, the loss-of-function mutation in the patatin-like phospholipase A2α gene is the MATRILINEAL (MATL) gene. In an aspect, the first plant expresses a marker gene. In an aspect, the marker gene is selected from a selectable marker, a reporter gene, a visible endogenous morphological marker, and combinations thereof. In an aspect, the selectable marker is selected from the group consisting of GUS, PMI, PAT, and combinations thereof. In an aspect, the reporter gene is selected from the group consisting of GFP, RFP, CFP, and combinations thereof. In an aspect, the visible endogenous morphological marker is selected from the group consisting of B1, R-nj, R1-scm, anthocyanin pigments, and combinations thereof. In an aspect, the genetic chromosome doubling agent is a genetic chromosome doubling polypeptide. In an aspect, the genetic chromosome doubling polypeptide is selected from the group consisting of a) a polypeptide allowing replication of a genome without cell division; b) a polypeptide destabilizing tubulin polymerization; c) a polypeptide altering cell cycle regulation; and d) combinations of the foregoing. In an aspect, the genetic chromosome doubling polypeptide allowing replication of the genome without cell division is selected from the group consisting of a) an amino acid sequence having at least 70% (e.g., at least 80%, 90%, 95%, or 98%) identical to SEQ ID NO: 24; b) an amino acid sequence having at least 70% (e.g., at least 80%, 90%, 95%, or 98%) identical to SEQ ID NO: 25; c) an amino acid sequence having at least 70% (e.g., at least 80%, 90%, 95%, or 98%) identical to SEQ ID NO: 26; or d) an amino acid sequence having at least 70% (e.g., at least 80%, 90%, 95%, or 98%) identical to SEQ ID NO: 2. In an aspect, the genetic chromosome doubling polypeptide destabilizing tubulin polymerization is selected from the group consisting of a) an amino acid sequence having at least 70% (e.g., at least 80%, 90%, 95%, or 98%) identical to SEQ ID NO: 3; orb) an amino acid sequence having at least 70% (e.g., at least 80%, 90%, 95%, or 98%) identical to SEQ ID NO: 28. In an aspect, the genetic chromosome doubling polypeptide altering cell cycle regulation is selected from the group consisting of a) an amino acid sequence having at least 70% (e.g., at least 80%, 90%, 95%, or 98%) identical to SEQ ID NO: 23; b) an amino acid sequence having at least 70% (e.g., at least 80%, 90%, 95%, or 98%) identical to SEQ ID NO: 86; c) an amino acid sequence having at least 70% (e.g., at least 80%, 90%, 95%, or 98%) identical to SEQ ID NO: 87; d) an amino acid sequence having at least 70% (e.g., at least 80%, 90%, 95%, or 98%) identical to SEQ ID NO: 88; e) an amino acid sequence having at least 70% (e.g., at least 80%, 90%, 95%, or 98%) identical to SEQ ID NO: 89; f) an amino acid sequence having at least 70% (e.g., at least 80%, 90%, 95%, or 98%) identical to SEQ ID NO: 90; g) an amino acid sequence having at least 70% (e.g., at least 80%, 90%, 95%, or 98%) identical to SEQ ID NO: 91; h) an amino acid sequence having at least 70% (e.g., at least 80%, 90%, 95%, or 98%) identical to SEQ ID NO: 92; i) an amino acid sequence having at least 70% (e.g., at least 80%, 90%, 95%, or 98%) identical to SEQ ID NO: 93; j) an amino acid sequence having at least 70% (e.g., at least 80%, 90%, 95%, or 98%) identical to SEQ ID NO: 94; k) an amino acid sequence having at least 70% (e.g., at least 80%, 90%, 95%, or 98%) identical to SEQ ID NO: 95; l) an amino acid sequence having at least 70% (e.g., at least 80%, 90%, 95%, or 98%) identical to SEQ ID NO: 96; m) an amino acid sequence having at least 70% (e.g., at least 80%, 90%, 95%, or 98%) identical to SEQ ID NO: 97; n) an amino acid sequence having at least 70% (e.g., at least 80%, 90%, 95%, or 98%) identical to SEQ ID NO: 98; o) an amino acid sequence having at least 70% (e.g., at least 80%, 90%, 95%, or 98%) identical to SEQ ID NO: 99; p) an amino acid sequence having at least 70% (e.g., at least 80%, 90%, 95%, or 98%) identical to SEQ ID NO: 100; q) an amino acid sequence having at least 70% (e.g., at least 80%, 90%, 95%, or 98%) identical to SEQ ID NO: 101; r) an amino acid sequence having at least 70% (e.g., at least 80%, 90%, 95%, or 98%) identical to SEQ ID NO: 102; or s) an amino acid sequence having at least 70% (e.g., at least 80%, 90%, 95%, or 98%) identical to SEQ ID NO: 103. In an aspect, the first plant is a haploid inducer of a different plant species than the second plant. In an aspect, the first plant is used in a wide hybridization. In an aspect, the second plant species is corn, soybean, wheat, brassica, cotton or sorghum. In an aspect, the second plant species is a non-hybrid crop species.

[0009] The present disclosure provides a method of producing a doubled haploid inducer (DHI) plant, the method comprising a) providing a transformable cell or tissue from a non-transgenic haploid inducer plant; b) transforming the cell or tissue with a heterologous DNA construct comprising a genetic chromosome doubling agent; and c) obtaining a double haploid inducer (DHI) line comprising the introduced genetic chromosome doubling agent. In an aspect, the non-transgenic haploid inducer comprises a loss-of-function mutation in a patatin-like phospholipase A2α gene. In an aspect, the loss-of-function mutation in the patatin-like phospholipase A2α gene is the MATRILINEAL (MATL) gene. In an aspect, the genetic chromosome doubling agent is selected from the group consisting of a) a polypeptide allowing replication of a genome without cell division; b) a polypeptide destabilizing tubulin polymerization; c) a polypeptide altering cell cycle regulation; and d) combinations of the foregoing. In an aspect, the genetic chromosome doubling polypeptide allowing replication of the genome without cell division is selected from the group consisting of a) an amino acid sequence having at least 70% (e.g., at least 80%, 90%, 95%, or 98%) identical to SEQ ID NO: 24; b) an amino acid sequence having at least 70% (e.g., at least 80%, 90%, 95%, or 98%) identical to SEQ ID NO: 25; c) an amino acid sequence having at least 70% (e.g., at least 80%, 90%, 95%, or 98%) identical to SEQ ID NO: 26; or d) an amino acid sequence having at least 70% (e.g., at least 80%, 90%, 95%, or 98%) identical to SEQ ID NO: 2. In an aspect, the genetic chromosome doubling polypeptide destabilizing tubulin polymerization is selected from the group consisting of a) an amino acid sequence having at least 70% (e.g., at least 80%, 90%, 95%, or 98%) identical to SEQ ID NO: 3; orb) an amino acid sequence having at least 70% (e.g., at least 80%, 90%, 95%, or 98%) identical to SEQ ID NO: 28. In an aspect, the genetic chromosome doubling polypeptide altering cell cycle regulation is selected from the group consisting of a) an amino acid sequence having at least 70% (e.g., at least 80%, 90%, 95%, or 98%) identical to SEQ ID NO: 23; b) an amino acid sequence having at least 70% (e.g., at least 80%, 90%, 95%, or 98%) identical to SEQ ID NO: 86; c) an amino acid sequence having at least 70% (e.g., at least 80%, 90%, 95%, or 98%) identical to SEQ ID NO: 87; d) an amino acid sequence having at least 70% (e.g., at least 80%, 90%, 95%, or 98%) identical to SEQ ID NO: 88; e) an amino acid sequence having at least 70% (e.g., at least 80%, 90%, 95%, or 98%) identical to SEQ ID NO: 89; f) an amino acid sequence having at least 70% (e.g., at least 80%, 90%, 95%, or 98%) identical to SEQ ID NO: 90; g) an amino acid sequence having at least 70% (e.g., at least 80%, 90%, 95%, or 98%) identical to SEQ ID NO: 91; h) an amino acid sequence having at least 70% (e.g., at least 80%, 90%, 95%, or 98%) identical to SEQ ID NO: 92; i) an amino acid sequence having at least 70% (e.g., at least 80%, 90%, 95%, or 98%) identical to SEQ ID NO: 93; j) an amino acid sequence having at least 70% (e.g., at least 80%, 90%, 95%, or 98%) identical to SEQ ID NO: 94; k) an amino acid sequence having at least 70% (e.g., at least 80%, 90%, 95%, or 98%) identical to SEQ ID NO: 95; l) an amino acid sequence having at least 70% (e.g., at least 80%, 90%, 95%, or 98%) identical to SEQ ID NO: 96; m) an amino acid sequence having at least 70% (e.g., at least 80%, 90%, 95%, or 98%) identical to SEQ ID NO: 97; n) an amino acid sequence having at least 70% (e.g., at least 80%, 90%, 95%, or 98%) identical to SEQ ID NO: 98; o) an amino acid sequence having at least 70% (e.g., at least 80%, 90%, 95%, or 98%) identical to SEQ ID NO: 99; p) an amino acid sequence having at least 70% (e.g., at least 80%, 90%, 95%, or 98%) identical to SEQ ID NO: 100; q) an amino acid sequence having at least 70% (e.g., at least 80%, 90%, 95%, or 98%) identical to SEQ ID NO: 101; r) an amino acid sequence having at least 70% (e.g., at least 80%, 90%, 95%, or 98%) identical to SEQ ID NO: 102; or s) an amino acid sequence having at least 70% (e.g., at least 80%, 90%, 95%, or 98%) identical to SEQ ID NO: 103.

[0010] The present disclosure provides a method of producing a doubled haploid inducer (DHI) line, the method comprising a) providing a transformed first haploid inducer line comprising a heterologous DNA construct comprising a genetic chromosome doubling agent; b) providing a second haploid inducer line containing a marker; c) crossing the first haploid inducer line with the second haploid inducer line to produce a combination of maternal and diploid embryos; d) selecting the maternal embryos based on the absence of the selectable marker from the second haploid inducer line; and e) obtaining a double haploid inducer (DHI) line comprising the introduced genetic chromosome doubling agent, thereby producing the DHI line. In an aspect, the first haploid inducer comprises a loss-of-function mutation in a patatin-like phospholipase A2α gene. In an aspect, the loss-of-function mutation in the patatin-like phospholipase A2α gene is the MATRILINEAL (MA TL) gene. In an aspect, the marker is selected from a selectable marker, a reporter gene, a visible endogenous morphological marker, and combinations thereof. In an aspect, the selectable marker is selected from the group consisting of GUS, PMI, PAT, and combinations thereof. In an aspect, the reporter gene is selected from the group consisting of GFP, RFP, CFP, and combinations thereof. In an aspect, the visible endogenous morphological marker is selected from the group consisting of B1, R-nj, R1-scm, anthocyanin pigments, and combinations thereof. In an aspect, the genetic chromosome doubling agent is a genetic chromosome doubling polypeptide. In an aspect, the genetic chromosome doubling polypeptide is selected from the group consisting of a) a polypeptide allowing replication of a genome without cell division; b) a polypeptide destabilizing tubulin polymerization; c) a polypeptide altering cell cycle regulation; and d) combinations of the foregoing. In an aspect, the genetic chromosome doubling polypeptide allowing replication of the genome without cell division is selected from the group consisting of a) an amino acid sequence having at least 70% (e.g., at least 80%, 90%, 95%, or 98%) identical to SEQ ID NO: 24; b) an amino acid sequence having at least 70% (e.g., at least 80%, 90%, 95%, or 98%) identical to SEQ ID NO: 25; c) an amino acid sequence having at least 70% (e.g., at least 80%, 90%, 95%, or 98%) identical to SEQ ID NO: 26; or d) an amino acid sequence having at least 70% (e.g., at least 80%, 90%, 95%, or 98%) identical to SEQ ID NO: 2. In an aspect, the genetic chromosome doubling polypeptide destabilizing tubulin polymerization is selected from the group consisting of a) an amino acid sequence having at least 70% (e.g., at least 80%, 90%, 95%, or 98%) identical to SEQ ID NO: 3; orb) an amino acid sequence having at least 70% (e.g., at least 80%, 90%, 95%, or 98%) identical to SEQ ID NO: 28. In an aspect, the genetic chromosome doubling polypeptide altering cell cycle regulation is selected from the group consisting of a) an amino acid sequence having at least 70% (e.g., at least 80%, 90%, 95%, or 98%) identical to SEQ ID NO: 23; b) an amino acid sequence having at least 70% (e.g., at least 80%, 90%, 95%, or 98%) identical to SEQ ID NO: 86; c) an amino acid sequence having at least 70% (e.g., at least 80%, 90%, 95%, or 98%) identical to SEQ ID NO: 87; d) an amino acid sequence having at least 70% (e.g., at least 80%, 90%, 95%, or 98%) identical to SEQ ID NO: 88; e) an amino acid sequence having at least 70% (e.g., at least 80%, 90%, 95%, or 98%) identical to SEQ ID NO: 89; f) an amino acid sequence having at least 70% (e.g., at least 80%, 90%, 95%, or 98%) identical to SEQ ID NO: 90; g) an amino acid sequence having at least 70% (e.g., at least 80%, 90%, 95%, or 98%) identical to SEQ ID NO: 91; h) an amino acid sequence having at least 70% (e.g., at least 80%, 90%, 95%, or 98%) identical to SEQ ID NO: 92; i) an amino acid sequence having at least 70% (e.g., at least 80%, 90%, 95%, or 98%) identical to SEQ ID NO: 93; j) an amino acid sequence having at least 70% (e.g., at least 80%, 90%, 95%, or 98%) identical to SEQ ID NO: 94; k) an amino acid sequence having at least 70% (e.g., at least 80%, 90%, 95%, or 98%) identical to SEQ ID NO: 95; l) an amino acid sequence having at least 70% (e.g., at least 80%, 90%, 95%, or 98%) identical to SEQ ID NO: 96; m) an amino acid sequence having at least 70% (e.g., at least 80%, 90%, 95%, or 98%) identical to SEQ ID NO: 97; n) an amino acid sequence having at least 70% (e.g., at least 80%, 90%, 95%, or 98%) identical to SEQ ID NO: 98; o) an amino acid sequence having at least 70% (e.g., at least 80%, 90%, 95%, or 98%) identical to SEQ ID NO: 99; p) an amino acid sequence having at least 70% (e.g., at least 80%, 90%, 95%, or 98%) identical to SEQ ID NO: 100; q) an amino acid sequence having at least 70% (e.g., at least 80%, 90%, 95%, or 98%) identical to SEQ ID NO: 101; r) an amino acid sequence having at least 70% (e.g., at least 80%, 90%, 95%, or 98%) identical to SEQ ID NO: 102; or s) an amino acid sequence having at least 70% (e.g., at least 80%, 90%, 95%, or 98%) identical to SEQ ID NO: 103.

[0011] The present disclosure provides a method of eliminating or reducing the step of exogenously inducing chromosome doubling after embryo formation in the production of an inbred population, the method comprising crossing a doubled haploid inducer (DHI) line comprising an introduced genetic chromosome doubling agent with a second line and obtaining a doubled haploid progeny of the second line without a separate step of chromosome doubling due to exogenous treatment of a chromosome doubling agent, wherein the double haploid progeny does not comprise the introduced genetic chromosome doubling agent. In an aspect, the doubled haploid inducer comprises a loss-of-function mutation in a patatin-like phospholipase A2α gene. In an aspect, the loss-of-function mutation in the patatin-like phospholipase A2α gene is the MATRILINEAL (MATL) gene. In an aspect, the doubled haploid inducer (DHI) line expresses a marker gene. In an aspect, wherein the marker gene is selected from a selectable marker, a reporter gene, a visible endogenous morphological marker, and combinations thereof. In an aspect, the selectable marker is selected from the group consisting of GUS, PMI, PAT, and combinations thereof. In an aspect, the reporter gene is selected from the group consisting of GFP, RFP, CFP, and combinations thereof. In an aspect, the visible endogenous morphological marker is selected from the group consisting of B1, R-nj, R1-scm, anthocyanin pigments, and combinations thereof. In an aspect, the introduced genetic chromosome doubling agent is a genetic chromosome doubling polypeptide. In an aspect, the genetic chromosome doubling polypeptide is selected from the group consisting of a) a polypeptide allowing replication of a genome without cell division; b) a polypeptide destabilizing tubulin polymerization; c) a polypeptide altering cell cycle regulation; and d) combinations of the foregoing. In an aspect, the genetic chromosome doubling polypeptide allowing replication of the genome without cell division is selected from the group consisting of a) an amino acid sequence having at least 70% (e.g., at least 80%, 90%, 95%, or 98%) identical to SEQ ID NO: 24; b) an amino acid sequence having at least 70% (e.g., at least 80%, 90%, 95%, or 98%) identical to SEQ ID NO: 25; c) an amino acid sequence having at least 70% (e.g., at least 80%, 90%, 95%, or 98%) identical to SEQ ID NO: 26; or d) an amino acid sequence having at least 70% (e.g., at least 80%, 90%, 95%, or 98%) identical to SEQ ID NO: 2. In an aspect, the genetic chromosome doubling polypeptide destabilizing tubulin polymerization is selected from the group consisting of a) an amino acid sequence having at least 70% (e.g., at least 80%, 90%, 95%, or 98%) identical to SEQ ID NO: 3; orb) an amino acid sequence having at least 70% (e.g., at least 80%, 90%, 95%, or 98%) identical to SEQ ID NO: 28. In an aspect, the genetic chromosome doubling polypeptide altering cell cycle regulation is selected from the group consisting of a) an amino acid sequence having at least 70% (e.g., at least 80%, 90%, 95%, or 98%) identical to SEQ ID NO: 23; b) an amino acid sequence having at least 70% (e.g., at least 80%, 90%, 95%, or 98%) identical to SEQ ID NO: 86; c) an amino acid sequence having at least 70% (e.g., at least 80%, 90%, 95%, or 98%) identical to SEQ ID NO: 87; d) an amino acid sequence having at least 70% (e.g., at least 80%, 90%, 95%, or 98%) identical to SEQ ID NO: 88; e) an amino acid sequence having at least 70% (e.g., at least 80%, 90%, 95%, or 98%) identical to SEQ ID NO: 89; f) an amino acid sequence having at least 70% (e.g., at least 80%, 90%, 95%, or 98%) identical to SEQ ID NO: 90; g) an amino acid sequence having at least 70% (e.g., at least 80%, 90%, 95%, or 98%) identical to SEQ ID NO: 91; h) an amino acid sequence having at least 70% (e.g., at least 80%, 90%, 95%, or 98%) identical to SEQ ID NO: 92; i) an amino acid sequence having at least 70% (e.g., at least 80%, 90%, 95%, or 98%) identical to SEQ ID NO: 93; j) an amino acid sequence having at least 70% (e.g., at least 80%, 90%, 95%, or 98%) identical to SEQ ID NO: 94; k) an amino acid sequence having at least 70% (e.g., at least 80%, 90%, 95%, or 98%) identical to SEQ ID NO: 95; l) an amino acid sequence having at least 70% (e.g., at least 80%, 90%, 95%, or 98%) identical to SEQ ID NO: 96; m) an amino acid sequence having at least 70% (e.g., at least 80%, 90%, 95%, or 98%) identical to SEQ ID NO: 97; n) an amino acid sequence having at least 70% (e.g., at least 80%, 90%, 95%, or 98%) identical to SEQ ID NO: 98; o) an amino acid sequence having at least 70% (e.g., at least 80%, 90%, 95%, or 98%) identical to SEQ ID NO: 99; p) an amino acid sequence having at least 70% (e.g., at least 80%, 90%, 95%, or 98%) identical to SEQ ID NO: 100; q) an amino acid sequence having at least 70% (e.g., at least 80%, 90%, 95%, or 98%) identical to SEQ ID NO: 101; r) an amino acid sequence having at least 70% (e.g., at least 80%, 90%, 95%, or 98%) identical to SEQ ID NO: 102; or s) an amino acid sequence having at least 70% (e.g., at least 80%, 90%, 95%, or 98%) identical to SEQ ID NO: 103.

[0012] The present disclosure provides a method of maintaining a doubled haploid inducer (DHI) line comprising a genetic chromosome doubling agent, the method comprising a) providing a maintainer line comprising a heterologous maintainer construct, the maintainer construct comprising (i) a repressor or an inhibitor component for the genetic chromosome doubling agent, (ii) a pollen transmission prevention component, and (iii) a selectable marker component to identify seeds that contain the maintainer construct; b) self-fertilizing the maintainer line having the maintainer construct and the genetic chromosome doubling agent; c) identifying seeds containing the maintainer construct from the self-fertilization, wherein the maintainer construct is present in about 50% of the F1 seeds; and d) growing the seeds containing the maintainer construct, thereby maintaining the DHI line in a diploid state for further seed increases or haploid induction crosses. In an aspect, the repressor or the inhibitor is a transcriptional repressor of the genetic chromosome doubling agent. In an aspect, the repressor or the inhibitor is an artificial micro RNA targeting the transcript of the genetic chromosome doubling agent. In an aspect, the selectable marker is a color-based marker suitable for seed sorting. In an aspect, the pollen transmission prevent component is a genetic element that reduces pollen viability thereby preventing the transmission of the maintainer construct through the pollen.

[0013] The present disclosure provides a doubled haploid inducer (DHI) maintainer line comprising a genetic chromosome doubling agent and a heterologous maintainer construct, the maintainer construct comprising (i) a repressor or an inhibitor component for the genetic chromosome doubling agent, (ii) a pollen transmission prevention component, and (iii) a selectable marker component to identify seeds that contain the maintainer construct. In an aspect, the repressor or the inhibitor is a transcriptional repressor of the genetic chromosome doubling agent. In an aspect, the repressor or the inhibitor is an artificial micro RNA targeting the transcript of the genetic chromosome doubling agent. In an aspect, the selectable marker is a color-based marker suitable for seed sorting. In an aspect, the pollen transmission prevent component is a genetic element that reduces pollen viability thereby preventing the transmission of the maintainer construct through the pollen.

### DESCRIPTION OF THE FIGURES

[0014] FIG. 1 shows construct designs useful in the methods of the present disclosure.

[0015] FIG. 2 shows a schematic representation of the methods of the present disclosure.

[0016] FIG. 3 shows a schematic using a doubled haploid inducer produced by the methods disclosed herein.

[0017] FIG. 4 shows a schematic representation of the methods of the present disclosure.

[0018] FIG. 5 shows a schematic of a maintainer construct (A), the genetic chromosome doubling agent (B), and seed identification (C) for maintaining the doubled haploid inducer line for seed increase and double haploid induction purposes.

### DETAILED DESCRIPTION

[0019] The disclosures herein will be described more fully hereinafter with reference to the accompanying figures, in which some, but not all possible aspects are shown. Indeed, disclosures may be embodied in many different forms and should not be construed as limited to the aspects set forth herein; rather, these aspects are provided so that this disclosure will satisfy applicable legal requirements.

[0020] Many modifications and other aspects disclosed herein will come to mind to one skilled in the art to which the disclosed methods and compositions pertain having the benefit of the teachings presented in the following descriptions and the associated figures. Therefore, it is to be understood that the disclosures are not to be limited to the specific aspects disclosed and that modifications and other aspects are intended to be included within the scope of the appended claims. Although specific terms are employed herein, they are used in a generic and descriptive sense only and not for purposes of limitation.

[0021] It is also to be understood that the terminology used herein is for the purpose of describing particular aspects only and is not intended to be limiting. As used in the specification and in the claims, the term “comprising” includes the aspect of “consisting of.” Unless defined otherwise, all technical and scientific terms used herein have the same meaning as commonly understood by one of ordinary skill in the art to which the disclosed methods and compositions belong. In this specification and in the claims which follow, reference will be made to a number of terms which shall be defined herein.

[0022] As used herein the singular forms “a”, “an”, and “the” include plural referents unless the context clearly dictates otherwise. Thus, for example, reference to “a cell” includes a plurality of such cells and reference to “the protein” includes reference to one or more proteins and equivalents thereof, and so forth. All technical and scientific terms used herein have the same meaning as commonly understood to one of ordinary skill in the art to which this disclosure belongs unless clearly indicated otherwise.

[0023] All patents, publications and patent applications mentioned in the specification are indicative of the level of those skilled in the art to which this disclosure pertains. All patents, publications and patent applications are herein incorporated by reference in the entirety to the same extent as if each individual patent, publication or patent application was specifically and individually indicated to be incorporated by reference in its entirety.

[0024] In plants, germ line cells (germline) provide the transgenerational inheritance of genetic information in each subsequent generation by producing spore mother cells during sporogenesis. For example, sporogenesis provides the megaspore mother cell that develops the female gametes, the egg cell and central cell that give rise to the embryo and endosperm, respectively; or the microspore mother cell that develops the male gamete, giving rise to four haploid microspores, wherein each microspore further develops into a mature pollen grain. A key aspect for the unique role of germline cells is providing the genetic information a future offspring receives, wherein half of the genetic contribution is from the female gamete and half of the genetic contribution is from the male gamete. Fertilization of the egg cell with one sperm cell forms a diploid zygote, while a second sperm cells fuses with the two polar nuclei of the central cell to form a triploid endosperm. The endosperm is a terminally nourishing tissue for the embryo yet does not contribute to the germline. After fertilization, the zygote gives rise to an embryo, a process referred to as zygotic embryogenesis that is characteristic of sexual reproduction. A newly formed embryo undergoing such an embryogenesis developmental program comprising an underlying regulatory program affected by genetic determinants and epigenetic reprogramming leading from an embryogenic cell state to the acquisition of a differentiated cell fate, or cell fates, ultimately giving rise to a plant with all differentiated tissues thereof.

[0025] Parthenogenesis is a natural form of asexual reproduction wherein growth and development of female gametes (embryos) occur without fertilization by sperm. The female gamete produced parthenogenetically may be either haploid or diploid.

[0026] The methods of the present disclosure alter such developmental programs of plant sexual and asexual reproduction described above. Such methods are valuable as plant reproduction methods for agricultural use. The present disclosure provides methods using molecular mechanisms impacting the cell cycle that are useful for agricultural use and crop improvement.

[0027] When an inducer line is used to pollinate a diploid plant, haploid embryos are derived. One sperm nucleus from the pollen fuses with the polar nuclei in the embryo sac to create a triploid (3N) endosperm. The triploid endosperm will contain 2 sets of chromosomes from the female and 1 set of chromosomes from the male, which in this case is the inducer line. The haploid embryo contains a single set of chromosomes, which are derived from the female plant and which is doubled by the methods and compositions described herein.

[0028] Wide hybridization crosses can also be used to produce haploids, where pollen from a distant but related genus/species is used as an inducer cross. This method of haploid production occurs due to the elimination of the chromosomes from the pollinating parent. Methods and compositions described herein with respect to providing a genetic chromosome doubling agent can also be provided through a wide hybridization-based induction cross.

[0029] Parthenogenesis induction refers to a method of providing a stimulus to a cell that improves levels of maternal haploid induction. Apetala2 (AP2) variant peptides are used as parthenogenesis factors, specifically comprising polypeptides or polynucleotides encoding gene products for generating doubled haploids or haploid plants from female gametes. Maize female gametophytes contacted with a parthenogenesis factor gene product results in improved levels of maternal haploid induction. Specifically, the gametes of a maize plant develop into a haploid plant when the plant is transformed with a genetic construct including regulatory elements and structural genes capable of altering the cellular fate of the plant cells. Further, the gametes of a maize plant develop into a diploid plant when the plant is transformed with a genetic construct including regulatory elements and structural genes capable of altering cellular fate and cell cycle regulation of plant cells. In the methods of the present disclosure, cell cycle regulating proteins expressed from a genetic construct are used for altering cell fate and ploidy levels in vivo.

[0030] As used herein, a “parthenogenesis factor” includes, but is not limited to, gene products that improve levels of maternal haploid induction and asexual reproduction wherein growth and development of female gametes (embryos) occur without fertilization by sperm when expressed in egg cells.

[0031] As used herein, a “parthenogenesis treatment” is any of the treatments disclosed herein that elicits an parthenogenic response in the contacted cell.

[0032] As used herein, “asexual reproduction” means reproduction without the fusion of gametes.

[0033] As used herein, “central cell” means the female gamete giving rise to the endosperm.

[0034] As used herein, “egg cell” means the female gamete giving rise to the embryo.

[0035] As used herein, “megaspore mother cell” means the cell that develops into the female gametophyte, also known as a megasporocyte, or functional megaspore (FMS).

[0036] As used herein, “microspore mother cell” means the cell that develops into the male gametophyte, also known as a microsporocyte.

[0037] As used herein, “gametogenesis” means the development of gametophytes from spores.

[0038] As used herein, “parthenogenesis” means the formation of an embryo from an unfertilized egg cell.

[0039] As used herein, “pseudogamy” means the fertilization-dependent formation of endosperm from a central cell.

[0040] As used herein, “sexual reproduction” means the mode of reproduction whereby female (egg) and male (sperm) gametes fuse to form a zygote.

[0041] As used herein, “somatic embryogenesis” means the formation of an embryo from a sporophytic cell without gamete and seed formation.

[0042] As used herein, “sporogenesis” means the formation of spores from spore mother cells.

[0043] As used herein, “spore mother cell” means the first cell of the reproductive lineage, formed from sporophytic cells in female and male reproductive tissues of the plant.

[0044] As used herein, “vegetative reproduction” means a form of reproduction in which a new plant is formed without the formation of an embryo.

[0045] As used herein, the term “embryo” means embryos and progeny of the same, immature and mature embryos, immature zygotic embryo, zygotic embryos, somatic embryos, embryogenic callus, and embryos derived from mature ear-derived seed. An embryo is a structure that is capable of germinating to form a plant.

[0046] As used herein, “haploid” means a plant or a plant cell having a single set (genome) of chromosomes and the reduced number of chromosomes (n) is equal to that in the gamete.

[0047] As used herein, the term “1n” or “1n cell” means a cell containing a single set of chromosomes, typically the product of meiosis. Examples of a 1n cell include gametes such as sperm cells, egg cells, or tissues derived from a gamete through mitotic divisions, such as a 1n embryo or a 1n plant. In maize where the plant is normally diploid, and the gametes are haploid, such gamete-derived embryos or plants are referred to as haploid embryos and haploid plants.

[0048] As used herein, “diploid” means a plant or a plant cell having two sets (genomes) of chromosomes and the chromosome number (2n) is equal to that in the zygote.

[0049] As used herein, the term “2n” or “2n cell” means a cell containing two sets of chromosomes. Examples of 2n cells include a zygote, an embryo resulting from mitotic divisions of a zygote, or a plant produced by germination of a 2n embryo.

[0050] As used herein, “haploid plant” means a plant having a single set (genome) of chromosomes and the reduced number of chromosomes (n) is equal to that in the gamete.

[0051] As used herein, the term “diploid plant” means a plant having two sets (genomes) of chromosomes and the chromosome number (2n) is equal to that in the zygote.

[0052] As used herein, a “doubled haploid” or a “doubled haploid plant or cell” is one that is developed by the doubling of a haploid set of chromosomes, male or female. A plant or seed that is obtained from a doubled haploid plant that is selfed any number of generations may still be identified as a doubled haploid plant. A doubled haploid plant is considered a homozygous plant. A plant is a doubled haploid if it is fertile, even if the entire vegetative part of the plant does not consist of the cells with the doubled set of chromosomes. For example, a plant will be considered a doubled haploid plant if it contains viable gametes, even if it is chimeric.

[0053] As used herein, a “doubled haploid embryo” is an embryo that has one or more cells containing 2 sets of homozygous chromosomes that are then be grown into a doubled haploid plant.

[0054] As used herein, the term “clonal” means multiple propagated plant cells or plants that are genetically, epigenetically and morphologically identical.

[0055] As used herein, the term “gamete” means a 1n reproductive cell such as a sperm cell, an egg cell or an ovule cell resulting from meiosis.

[0056] As used herein, the term “haploid embryo” means a gamete-derived somatic structure.

[0057] As used herein, the term “somatic structure” means a tissue, organ or organism.

[0058] As used herein, the term “somatic cell” is a cell that is not a gamete. Somatic cells, tissues or plants are haploid, diploid, triploid, tetraploid, hexaploid, etc. A complete set of chromosomes is referred to as being 1n (haploid), with the number of chromosomes found in a single set of chromosomes being referred to as the monoploid number (x). For example, in the diploid plant Zea mays, 2n=2x=20 total chromosomes, while in diploid rice Oryza sativa, 2n=2x=24 total chromosomes. In a triploid plant, such as banana, 2n=3x=33 total chromosomes. In hexaploid wheat Triticum aestivum, 2n=6x=42. Ploidy levels also vary between cultivars within the same species, such as in sugarcane, Saccharum officinarum, where 2n=10x=80 chromosomes, but commercial sugarcane varieties range from 100 to 130 chromosomes.

[0059] As used herein “karyogamy” is the final step in the process of fusing together two haploid eukaryotic cells and refers specifically to the fusion of the two nuclei. Before karyogamy, each haploid cell has one complete copy of the organism's genome.

[0060] As used herein, the term “medium” includes compounds in a liquid state, a gaseous state, or a solid state.

[0061] As used herein, the term “selectable marker” means a marker that when expressed in a modified, transformed/transfected cell confers a phenotypic or genotypic characteristic that is distinguishable from a control sample.

[0062] As used herein, the term “EAR” means an “Ethylene-responsive element binding factor-associated Amphiphilic Repression motif” with a general consensus sequence of LLxLxL, DNLxxP, LxLxPP, R/KLFGV, or TLLLFR that act as transcriptional repression signals within transcription factors. Addition of an EAR-type repressor element to a DNA-binding protein such as a transcription factor, dCAS9, or LEXA (as examples) confers transcriptional repression function to the fusion protein (Kagale, S., and Rozwadowski, K. 2010. Plant Signaling and Behavior 5:691-694).

[0063] As used herein, the term “transcription factor” means a protein that controls the rate of transcription of specific genes by binding to the DNA sequence of the promoter and either up-regulating or down-regulating expression. Examples of transcription factors, which are also morphogenic genes, include members of the AP2/EREBP family (including the Babyboom (BBM) and Ovule Development Protein 2 (ODP2) genes and variants, plethora and aintegumenta sub-families, CAAT-box binding proteins such as LEC1 and HAP3, and members of the MYB, bHLH, NAC, MADS, bZIP and WRKY families. In an aspect, ZM-ODP2 (SEQ ID NO: 61 encoding SEQ ID NO: 62), Os-ODP2 (OsANT (Oryza sativa ANT, Genbank Accession NO. AP003313) ((SEQ ID NO: 63 encoding SEQ ID NO: 64)), and Os-ODP2 (Oryza sativa BMN, Genbank Accession NO. AY062180) ((SEQ ID NO: 65 encoding SEQ ID NO: 66))) are useful as morphogenic genes in the methods of the present disclosure.

[0064] As used herein, the term “synthetic transcription factor” refers to a molecule comprising at least two domains, a recognition domain and a regulatory domain not naturally occurring in nature.

[0065] As used herein, the term “expression cassette” means a distinct component of vector DNA consisting of coding and non-coding sequences including 5′ and 3′ regulatory sequences that control expression in a transformed/transfected cell.

[0066] As used herein, the term “coding sequence” means the portion of DNA sequence bounded by a start and a stop codon that encodes the amino acids of a protein.

[0067] As used herein, the term “non-coding sequence” means the portions of a DNA sequence that are transcribed to produce a messenger RNA, but that do not encode the amino acids of a protein, such as 5′ untranslated regions, introns and 3′ untranslated regions. Non-coding sequence also refers to RNA molecules such as micro-RNAs, interfering RNA or RNA hairpins, that when expressed down-regulate expression of an endogenous gene or another transgene.

[0068] As used herein, the term “regulatory sequence” means a segment of a nucleic acid molecule which is capable of increasing or decreasing the expression of a gene. Regulatory sequences include promoters, terminators, enhancer elements, silencing elements, 5′ UTR and 3′ UTR (untranslated region).

[0069] As used herein, the term “transfer cassette” means a T-DNA comprising an expression cassette or expression cassettes flanked by the right border and the left border.

[0070] As used herein, the term “T-DNA” means a portion of a Ti plasmid that is inserted into the genome of a host plant cell.

[0071] As used herein, the term “embryogenesis factor” means a gene that when expressed enhances improved formation of a somatically-derived structure. More precisely, ectopic expression of an embryogenesis factor stimulates de novo formation of an organogenic structure, for example a structure from embryogenic callus tissue, that improves the formation of an embryo. This stimulated de novo embryogenic formation occurs either in the cell in which the embryogenesis factor is expressed, or in a neighboring cell. An embryogenesis factor gene is a transcription factor that regulates expression of other genes or a gene that influences hormone levels in a plant cell which stimulates embryogenic changes.

[0072] An embryogenesis factor is involved in plant metabolism, organ development, stem cell development, cell growth stimulation, organogenesis, somatic embryogenesis initiation, accelerated somatic embryo maturation, initiation and/or development of the apical meristem, initiation and/or development of shoot meristem, or a combination thereof.

[0073] In an aspect, the present disclosure provides a method for producing plants using asexual reproduction. Apogamy, a type of reproduction of flowering plants, is characterized by a diploid cell in the embryo sac developing into an embryo without being fertilized. Parthenogenesis is one form of apogamy and in a broader sense includes de novo embryogenic formation from a haploid gametophytic cell, for example an egg cell resulting from megasporogenesis.

[0074] The present disclosure provides efficient and effective methods of producing populations of recombinant inbred lines including, but not limited to, methods of enabling generation of doubled haploid recombinant populations.

[0075] A parthenogenesis factor may be used in combination with a morphogenic developmental gene involved in plant metabolism, organ development, stem cell development, cell growth stimulation, organogenesis, somatic embryogenesis initiation, accelerated somatic embryo maturation, initiation and/or development of the apical meristem, initiation and/or development of shoot meristem, or combinations thereof to improve maternal haploid production. When parthenogenesis factors are co-expressed with a morphogenic developmental gene improved methods for obtaining a maternal haploid plant are provided.

[0076] As used herein, the term “morphogenic gene” or “morphogenic developmental gene” means a gene that when ectopically expressed stimulates formation of a somatically-derived structure that produces a plant. More precisely, ectopic expression of the morphogenic gene stimulates the de novo formation of a somatic embryo or an organogenic structure, such as a shoot meristem, that produces a plant. This stimulated de novo formation occurs either in the cell in which the morphogenic gene is expressed, or in a neighboring cell. A morphogenic gene is a transcription factor that regulates expression of other genes, or a gene that influences hormone levels in a plant tissue, both of which stimulate morphogenic changes. A morphogenic gene may be stably incorporated into the genome of a plant or it may be transiently expressed. As used herein, the term “morphogenic factor” means a morphogenic gene and/or the protein expressed by a morphogenic gene.

[0077] Morphogenic genes involved in plant metabolism, organ development, stem cell development, cell growth stimulation, organogenesis, regeneration, somatic embryogenesis initiation, accelerated somatic embryo maturation, initiation and/or development of the apical meristem, initiation and/or development of shoot meristem, initiation and/or development of shoots, or a combination thereof, such as WUS/WOX genes (WUS1, WUS2, WUS3, WOX2A, WOX4, WOX5, or WOX9) see U.S. Pat. Nos. 7,348,468 and 7,256,322 and United States Patent Application publications 2017/0121722 and 2007/0271628; Laux et al. (1996) Development 122:87-96; and Mayer et al. (1998) Cell 95:805-815; van der Graaff et al., 2009, Genome Biology 10:248; Dolzblasz et al. 2016. Mol. Plant 19:1028-39 are useful in the methods of the present disclosure. Modulation of WUS/WOX is expected to modulate plant and/or plant tissue phenotype including plant metabolism, organ development, stem cell development, cell growth stimulation, organogenesis, regeneration, somatic embryogenesis initiation, accelerated somatic embryo maturation, initiation and/or development of the apical meristem, initiation and/or development of shoot meristem, initiation and/or development of shoots, or a combination thereof. Expression of Arabidopsis WUS induces stem cells in vegetative tissues, which differentiate into somatic embryos (Zuo, et al. (2002) Plant J 30:349-359). Also of interest in this regard, would be a MYB118 gene (see U.S. Pat. No. 7,148,402), a MYB115 gene (see Wang et al. (2008) Cell Research 224-235), a BABYBOOM gene (BBM; see Boutilier et al. (2002) Plant Cell 14:1737-1749), or a CLAVATA gene (see, for example, U.S. Pat. No. 7,179,963). Morphogenic genes useful in the present disclosure include, but are not limited to, functional WUS/WOX genes.

[0078] Morphogenic polynucleotide sequences and amino acid sequences of WUS/WOX homeobox polypeptides are useful in the disclosed methods. As defined herein, a “functional WUS/WOX nucleotide” or a “functional WUS/WOX gene” is any polynucleotide encoding a protein that contains a homeobox DNA binding domain, a WUS box, and an EAR repressor domain (Ikeda et al., 2009 Plant Cell 21:3493-3505). As demonstrated by Rodriguez et al., 2016 PNAS www.pnas.org/cgi/doi/10.1073/pnas.1607673113 removal of the dimerization sequence which leaves behind the homeobox DNA binding domain, a WUS box, and an EAR repressor domain results in a functional WUS/WOX polypeptide. The WUSCHEL protein, designated hereafter as WUS, plays a key role in the initiation and maintenance of the apical meristem, which contains a pool of pluripotent stem cells (Endrizzi et al., (1996) Plant Journal 10:967-979; Laux, et al., (1996) Development 122:87-96; and Mayer, et al., (1998) Cell 95:805-815). Arabidopsis plants mutant for the WUS gene contain stem cells that are misspecified and that appear to undergo differentiation. WUS encodes a homeodomain protein which presumably functions as a transcriptional regulator (Mayer, et al., (1998) Cell The stem cell population of Arabidopsis shoot meristems is believed to be maintained by a regulatory loop between the CLAVATA (CLV) genes which promote organ initiation and the WUS gene which is required for stem cell identity, with the CLV genes repressing WUS at the transcript level, and WUS expression being sufficient to induce meristem cell identity and the expression of the stem cell marker CLV3 (Brand, et al., (2000) Science 289:617-619; Schoof, et al., (2000) Cell 100:635-644). Constitutive expression of WUS in Arabidopsis has been shown to lead to adventitious shoot proliferation from leaves (in planta) (Laux, T., Talk Presented at the XVI International Botanical Congress Meeting, Aug. 1-7, 1999, St. Louis, Mo.).

[0079] In an aspect, the functional WUS/WOX homeobox polypeptide useful in the methods of the present disclosure is a WUS1, WUS2, WUS3, WOX2A, WOX4, WOX5, WOX5A, or WOX9 polypeptide (see, U.S. Pat. Nos. 7,348,468 and 7,256,322 and US Patent Application Publication Numbers 2017/0121722 and 2007/0271628, herein incorporated by reference in their entirety and van der Graaff et al., 2009, Genome Biology 10:248). The functional WUS/WOX homeobox polypeptide useful in the methods of the present disclosure is obtained from or derived from any plant. Functional WUS/WOX nucleotides encoding proteins that contain a homeobox DNA binding domain, a WUS box, and an EAR repressor domain useful in the methods of the present disclosure are disclosed in US Patent Application Publication Number 2020/0270622 incorporated herein by reference in its entirety.

[0080] Other morphogenic genes useful in the present disclosure include, but are not limited to, LEC1 (U.S. Pat. No. 6,825,397 incorporated herein by reference in its entirety, Lotan et al., 1998, Cell 93:1195-1205), LEC2 (Stone et al., 2008, PNAS 105:3151-3156; Belide et al., 2013, Plant Cell Tiss. Organ Cult 113:543-553), KN1/STM (Sinha et al., 1993. Genes Dev 7:787-795), the IPT gene from Agrobacterium (Ebinuma and Komamine, 2001, In vitro Cell. Dev Biol—Plant 37:103-113), MONOPTEROS-DELTA (Ckurshumova et al., 2014, New Phytol. 204:556-566), the Agrobacterium AV-6b gene (Wabiko and Minemura 1996, Plant Physiol. 112:939-951), the combination of the Agrobacterium IAA-h and IAA-m genes (Endo et al., 2002, Plant Cell Rep., 20:923-928), the Arabidopsis SERK gene (Hecht et al., 2001, Plant Physiol. 127:803-816), the Arabiopsis AGL15 gene (Harding et al., 2003, Plant Physiol. 133:653-663), the FUSCA gene (Castle and Meinke, Plant Cell 6:25-41), and the PICKLE gene (Ogas et al., 1999, PNAS 96:13839-13844).

[0081] Generally, a pollen lethality polynucleotide or a non-transmission pollen polynucleotide indicates any polynucleotide that prevents the pollen from achieving fertilization. This non-transmissibility can be achieved at the transcript level (e.g., transcriptional impact) or at a protein level, e.g., enzymatic action resulting in pollen lethality or non-transmissibility. In certain embodiments, the pollen non-transmission is most effective if it occurs at the post-meiotic or gametophytic stage. The non-transmission pollen polynucleotide can work through various mechanisms. It may prevent the pollen from being viable for example by the expression of a toxic compound.

[0082] The present disclosure also includes plants obtained by any of the disclosed methods or compositions herein. The present disclosure also includes seeds from a plant obtained by any of the methods or compositions disclosed herein. As used herein, the term “plant” refers to whole plants, plant organs (e.g., leaves, stems, roots, etc.), plant tissues, plant cells, plant parts, seeds, propagules, embryos and progeny of the same. As used herein, the term “plant” refers to whole plants, plant organs (e.g., leaves, stems, roots, etc.), plant tissues, plant cells, plant parts, seeds, propagules, embryos and progeny of the same. Plant cells are differentiated or undifferentiated (e.g. callus, undifferentiated callus, immature and mature embryos, immature zygotic embryo, immature cotyledon, embryonic axis, suspension culture cells, protoplasts, leaf, leaf cells, root cells, phloem cells and pollen). Plant cells include, without limitation, cells from seeds, suspension cultures, explants, immature embryos, embryos, zygotic embryos, somatic embryos, embryogenic callus, meristem, somatic meristems, organogenic callus, protoplasts, embryos derived from mature ear-derived seed, leaf bases, leaves from mature plants, leaf tips, immature inflorescences, tassel, immature ear, silks, cotyledons, immature cotyledons, meristematic regions, callus tissue, cells from leaves, cells from stems, cells from roots, cells from shoots, gametophytes, sporophytes, pollen, microspores, multicellular structures (MCS), and embryo-like structures (ELS). Plant parts include differentiated and undifferentiated tissues including, but not limited to, roots, stems, shoots, leaves, pollen, seeds, tumor tissue and various forms of cells in culture (e. g., single cells, protoplasts, embryos, and callus tissue). The plant tissue may be in a plant or in a plant organ, tissue, or cell culture. Grain is intended to mean the mature seed produced by commercial growers for purposes other than growing or reproducing the species. Progeny, variants and mutants of the regenerated plants are also included within the scope of the present disclosure, provided these progeny, variants and mutants are derived from regenerated plants made using the methods and compositions disclosed herein and/or comprise the introduced polynucleotides disclosed herein.

[0083] As used herein, the terms “transformed plant” and “transgenic plant” refer to a plant that comprises within its genome a heterologous polynucleotide. Generally, the heterologous polynucleotide is stably integrated within the genome of a transgenic or transformed plant such that the polynucleotide is passed on to successive generations. The heterologous polynucleotide may be integrated into the genome alone or as part of a recombinant DNA construct. As used herein the term “transgenic” includes any cell, cell line, callus, tissue, plant part or plant the genotype of which has been altered by the presence of a heterologous nucleic acid including those transgenics initially so altered as well as those created by sexual crosses or asexual propagation from the initial transgenic. A transgenic plant is defined as a mature, fertile plant that contains a transgene.

[0084] A transgenic “event” is produced by transformation of plant cells with a heterologous DNA construct, including a nucleic acid expression cassette that comprises a gene of interest, the regeneration of a population of plants resulting from the insertion of the transferred gene into the genome of the plant and selection of a plant characterized by insertion into a particular genome location. An event is characterized phenotypically by the expression of the inserted gene. At the genetic level, an event is part of the genetic makeup of a plant. The term “event” also refers to progeny produced by a sexual cross between the transformant and another plant wherein the progeny include the heterologous DNA.

[0085] The compositions and methods of the present disclosure are applicable to a broad range of plant species, including dicotyledonous plants and monocotyledonous plants. Representative examples of plants that are treated in accordance with the methods disclosed herein include, but are not limited to, wheat, cotton, sunflower, safflower, tobacco, Arabidopsis, barley, oats, rice, maize, triticale, sorghum, rye, millet, flax, sugarcane, banana, cassava, common bean, cowpea, tomato, potato, beet, grape, Eucalyptus, wheat grasses, turf grasses, alfalfa, clover, soybean, peanuts, citrus, papaya, Setaria sp, cacao, cucumber, apple, Capsicum, bamboo, melon, ornamentals including commercial garden and flower bulb species, fruit trees, vegetable species, Brassica species, as well as interspecies hybrids. In a preferred embodiment, the compositions and methods of the present disclosure are applied to maize plants.

[0086] The methods of the present disclosure involve introducing a polypeptide, polynucleotide (i.e., DNA or RNA), or nucleotide construct (i.e., DNA or RNA) into a plant. As used herein, “introducing” means presenting to the plant the polynucleotide, polypeptide, or nucleotide construct in such a manner that the polynucleotide, polypeptide, or nucleotide construct gains access to the interior of a cell of the plant. The methods of the present disclosure do not depend on a particular method for introducing the polynucleotide, polypeptide, or nucleotide construct into a plant, only that the polynucleotide, polypeptide, or nucleotide construct gains access to the interior of at least one cell of the plant. Methods for introducing polynucleotides, polypeptides, or nucleotide constructs into plants include, but are not limited to, stable transformation methods, transient transformation methods and virus-mediated methods.

[0087] As used herein, a “stable transformation” is a transformation in which the polynucleotide or nucleotide construct introduced into a plant integrates into the genome of the plant and is capable of being inherited by the progeny thereof. “Transient transformation” means that a polynucleotide or nucleotide construct is introduced into the plant and does not integrate into the genome of the plant or a polypeptide is introduced into a plant. In addition, “transient”, in certain embodiments may represent the presence of an embryogenesis inducing agent in a cell where such an agent has been exogenously applied or secreted from a neighboring cell or is being produced from an extrachromosomal location (e.g., plasmid or another independently replicating origin), or not produced by a stably integrated recombinant DNA construct within the same cell.

[0088] As used herein, “contacting”, “comes in contact with” or “in contact with” mean “direct contact” or “indirect contact”. For example, cells are placed in a condition where the cells come into contact with any of the parthenogenesis inducing genes disclosed herein including, but not limited to, an embryogenesis inducing embryogenesis factor, a morphogenic developmental gene, a small molecule or a doubling agent. Such substance is allowed to be present in an environment where the cells survive (for example, medium or expressed in the cell or expressed in an adjacent cell) and act on the cells. For example, the medium comprising a doubling agent may have direct contact with the haploid cell or the medium comprising the doubling agent may be separated from the haploid cell by filter paper, plant tissues, or other cells thus the doubling agent is transferred through the filter paper or cells to the haploid cell.

[0089] As used herein, the term “biparental cross” is the cross-fertilization of two genetically different plants to obtain the first filial generation of offspring and/or any successive filial generation thereafter. As used herein a biparental cross includes the offspring that are the progeny of any filial generation of offspring, including cross-fertilizing an offspring to one of its parental lines or an individual genetically like its parent to obtain progeny with a genetic identity closer to that of the parent referred to as a “backcross” and/or any successive backcross generation thereafter.

[0090] The methods provided herein rely upon the use of bacteria-mediated and/or biolistic-mediated gene transfer to produce regenerable plant cells. Bacterial strains useful in the methods of the present disclosure include, but are not limited to, a disarmed Agrobacteria, an Ochrobactrum bacteria or a Rhizobiaceae bacteria (U.S. Pat. No. 9,365,859 incorporated herein by reference in its entirety). Standard protocols for particle bombardment (Finer and McMullen, 1991, In Vitro Cell Dev. Biol.—Plant 27:175-182), Agrobacterium-mediated transformation (Jia et al., 2015, Int J. Mol. Sci. 16:18552-18543; US2017/0121722 incorporated herein by reference in its entirety), or Ochrobactrum-mediated transformation (US2018/0216123 incorporated herein by reference in its entirety is used with the methods and compositions of the present disclosure. Numerous methods for introducing heterologous genes into plants are used to insert a polynucleotide into a plant host, including biological and physical plant transformation protocols. See, e.g., Miki et al., “Procedure for Introducing Foreign DNA into Plants,” in Methods in Plant Molecular Biology and Biotechnology, Glick and Thompson, eds., CRC Press, Inc., Boca Raton, pp. 67-88 (1993). The methods chosen vary with the host plant and include chemical transfection methods such as calcium phosphate, microorganism-mediated gene transfer such as Agrobacterium (Horsch, et al., (1985) Science 227:1229-31), Ochrobactrum (US2018/0216123), electroporation, micro-injection and biolistic bombardment. Expression cassettes and vectors and in vitro culture methods for plant cell or tissue transformation and regeneration of transgenic plants are available. See, e.g., Gruber, et al., “Vectors for Plant Transformation,” in Methods in Plant Molecular Biology and Biotechnology, supra, pp. 89-119.

[0091] Transformation protocols as well as protocols for introducing nucleotide sequences into plants may vary depending on the type of plant or plant cell, i.e., monocot or dicot, targeted for transformation. Suitable methods of introducing nucleotide sequences into plant cells and subsequent insertion into the plant genome include microinjection (Crossway, et al., (1986) Biotechniques 4:320-334), electroporation (Riggs, et al., (1986) Proc. Natl. Acad. Sci. USA 83:5602-5606), Agrobacterium-mediated transformation (Townsend, et al., U.S. Pat. No. 5,563,055 and Zhao, et al., U.S. Pat. No. 5,981,840), Ochrobactrum-mediated transformation (US2018/0216123), direct gene transfer (Paszkowski, et al., (1984) EMBO J. 3:2717-2722) and ballistic particle acceleration (see, for example, U.S. Pat. Nos. 4,945,050; 5,879,918; 5,886,244; 5,932,782; Tomes, et al., (1995) in Plant Cell, Tissue, and Organ Culture: Fundamental Methods, ed. Gamborg and Phillips (Springer-Verlag, Berlin); McCabe, et al., (1988) Biotechnology 6:923-926) and Lec1 transformation (U.S. Pat. No. 6,825,397). See also, Weissinger, et al., (1988) Ann. Rev. Genet. 22:421-477; Sanford, et al., (1987) Particulate Science and Technology 5:27-37 (onion); Christou, et al., (1988) Plant Physiol. 87:671-674 (soybean); McCabe, et al., (1988) Bio/Technology 6:923-926 (soybean); Finer and McMullen, (1991) In Vitro Cell Dev. Biol. 27P:175-182 (soybean); Singh, et al., (1998) Theor. Appl. Genet. 96:319-324 (soybean); Datta, et al., (1990) Biotechnology 8:736-740 (rice); Klein, et al., (1988) Proc. Natl. Acad. Sci. USA 85:4305-4309 (maize); Klein, et al., (1988) Biotechnology 6:559-563 (maize); U.S. Pat. Nos. 5,240,855; 5,322,783 and Klein, et al., (1988) Plant Physiol. 91:440-444 (maize); Fromm, et al., (1990) Biotechnology 8:833-839 (maize); Hooykaas-Van Slogteren, et al., (1984) Nature (London) 311:763-764; U.S. Pat. No. 5,736,369 (cereals); Bytebier, et al., (1987) Proc. Natl. Acad. Sci. USA 84:5345-5349 (Liliaceae); De Wet, et al., (1985) in The Experimental Manipulation of Ovule Tissues, ed. Chapman, et al., (Longman, New York), pp. 197-209 (pollen); Kaeppler, et al., (1990) Plant Cell Reports 9:415-418 and Kaeppler, et al., (1992) Theor. Appl. Genet. 84:560-566 (whisker-mediated transformation); D'Halluin, et al., (1992) Plant Cell 4:1495-1505 (electroporation); Li, et al., (1993) Plant Cell Reports 12:250-255 and Christou and Ford, (1995) Annals of Botany 75:407-413 (rice); Ishida, et al., (1996) Nature Biotechnology 14:745-750 (maize via Agrobacterium tumefaciens), all of which are herein incorporated by reference in their entirety. Methods and compositions for rapid plant transformation are also found in U.S. 2017/0121722, herein incorporated in its entirety by reference. Vectors useful in plant transformation are found in U.S. patent application Ser. No. 15/765,521, herein incorporated by reference in its entirety.

[0092] Reporter genes or selectable marker genes may also be included in the expression cassettes of the present disclosure. Examples of suitable reporter genes are found in, for example, Jefferson, et al., (1991) in Plant Molecular Biology Manual, ed. Gelvin, et al., (Kluwer Academic Publishers), pp. 1-33; DeWet, et al., (1987) Mol. Cell. Biol. 7:725-737; Goff, et al., (1990) EMBO J. 9:2517-2522; Kain, et al., (1995) Bio Techniques 19:650-655 and Chiu, et al., (1996) Current Biology 6:325-330, herein incorporated by reference in their entirety.

[0093] Selectable marker genes for selection of transformed cells or tissues include genes that confer antibiotic resistance or resistance to herbicides. Examples of suitable selectable marker genes include, but are not limited to, genes encoding resistance to chloramphenicol (Herrera Estrella, et al., (1983) EMBO J. 2:987-992); methotrexate (Herrera Estrella, et al., (1983) Nature 303:209-213; Meijer, et al., (1991) Plant Mol. Biol. 16:807-820); hygromycin (Waldron, et al., (1985) Plant Mol. Biol. 5:103-108 and Zhijian, et al., (1995) Plant Science 108:219-227); streptomycin (Jones, et al., (1987) Mol. Gen. Genet. 210:86-91); spectinomycin (Bretagne-Sagnard, et al., (1996) Transgenic Res. 5:131-137); bleomycin (Hille, et al., (1990) Plant Mol. Biol. 7:171-176); sulfonamide (Guerineau, et al., (1990) Plant Mol. Biol. 15:127-36); bromoxynil (Stalker, et al., (1988) Science 242:419-423); glyphosate (Shaw, et al., (1986) Science 233:478-481 and U.S. patent application Ser. Nos. 10/004,357 and 10/427,692); phosphinothricin (DeBlock, et al., (1987) EMBO J. 6:2513-2518), herein incorporated by reference in their entirety.

[0094] Other genes may be used the expression cassettes of the present disclosure that also assist in the recovery of transgenic events and include, but are not limited to, GUS (beta-glucuronidase; Jefferson, (1987) Plant Mol. Biol. Rep. 5:387), GFP (green fluorescence protein; Chalfie, et al., (1994) Science 263:802), luciferase (Riggs, et al., (1987) Nucleic Acids Res. 15(19):8115 and Luehrsen, et al., (1992) Methods Enzymol. 216:397-414) and the maize genes encoding for anthocyanin production (Ludwig, et al., (1990) Science 247:449), herein incorporated by reference in their entirety.

[0095] The present disclosure also provides methods of contacting haploid cells with an amount of a chromosome doubling agent before, during, after, or overlapping with any portion of the isolation and embryogenesis induction process used for generating a paternal gamete (androgenic) or a maternal gamete (gynogenic) doubled haploid population.

[0096] As used herein “recombinant” means a cell or vector, that has been modified by the introduction of a heterologous nucleic acid or a cell derived from a cell so modified. Thus, for example, a recombinant cell is a cell expressing a gene that is not found in identical form or location within the native (non-recombinant) cell or a cell that expresses a native gene in an expression pattern that is different from that of the native (non-recombinant) cell for example, the native gene is abnormally expressed, under expressed, has reduced expression or is not expressed at all because of deliberate human intervention. The term “recombinant” as used herein does not encompass the alteration of a cell or vector by naturally occurring events (e.g., spontaneous mutation, natural transformation/transduction/transposition) such as those occurring without deliberate human intervention.

[0097] As used herein, a “recombinant expression cassette” is a nucleic acid construct, generated recombinantly or synthetically, with a series of specified nucleic acid elements, which permit transcription of a particular nucleic acid in a target cell. The recombinant expression cassette is incorporated into a plasmid, chromosome, mitochondrial DNA, plastid DNA, virus or nucleic acid fragment. Typically, the recombinant expression cassette portion of an expression vector includes, among other sequences, a nucleic acid to be transcribed and a promoter.

[0098] The terms “polypeptide,” “peptide” and “protein” are used interchangeably herein to refer to a polymer of amino acid residues. The terms apply to amino acid polymers in which one or more amino acid residue is an artificial chemical analogue of a corresponding naturally occurring amino acid, as well as to naturally occurring amino acid polymers.

[0099] The term “regulatory element” refers to a nucleic acid molecule having gene regulatory activity, i.e. one that has the ability to affect the transcriptional and/or translational expression pattern of an operably linked transcribable polynucleotide. The term “gene regulatory activity” thus refers to the ability to affect the expression of an operably linked transcribable polynucleotide molecule by affecting the transcription and/or translation of that operably linked transcribable polynucleotide molecule. Gene regulatory activity may be positive and/or negative and the effect may be characterized by its temporal, spatial, developmental, tissue, environmental, physiological, pathological, cell cycle, and/or chemically responsive qualities as well as by quantitative or qualitative indications.

[0100] In an aspect, a regulatory element expressed in the egg cell of the plant is useful for regulating ZM-ODP2 peptide activity to induce maternal haploid induction, resulting in a percentage of the progeny produced being haploid (having half the number of chromosomes compared to the parent). In addition, alternative regulatory elements are used to further optimize parthenogenic maternal haploid induction levels. For example, regulatory elements such as those disclosed in US2015/0152430 (promoters including, but not limited to the AT-DD5 promoter, the AT-DD31 promoter, the AT-DD65 promoter, and the ZM-DD45) and those disclosed in US2018/0094273 (Zea mays egg cell promoters) are used in the methods of the present disclosure (US2015/0152430 and US2018/0094273 incorporated herein by reference in their entireties).

[0101] Cis regulatory elements are regulatory elements that affect gene expression. Cis regulatory elements are regions of non-coding DNA that regulate the transcription of neighboring genes, often as DNA sequences in the vicinity of the genes that they regulate. Cis regulatory elements typically regulate gene transcription by encoding DNA sequences conferring transcription factor binding.

[0102] As used herein “promoter” is an exemplary regulatory element and generally refers to a nucleotide sequence capable of controlling the expression of a coding sequence or functional RNA. In general, a coding sequence is located 3′ to a promoter sequence. The promoter sequence comprises proximal and more distal upstream elements, the latter elements are often referred to as enhancers. Accordingly, an “enhancer” is a nucleotide sequence that stimulates promoter activity and may be an innate element of the promoter or a heterologous element inserted to enhance the level or tissue-specificity of a promoter. Promoters may be derived in their entirety from a native gene or may be composed of different elements derived from different promoters found in nature, or even comprise synthetic nucleotide segments. Different regulatory elements may direct the expression of a gene in different tissues or cell types, or at different stages of development, or in response to different environmental conditions.

[0103] A “plant promoter” is a promoter capable of initiating transcription in plant cells. Exemplary plant promoters include, but are not limited to, those that are obtained from plants, plant viruses, and bacteria such as Agrobacterium or Rhizobium, which comprise genes expressed in plant cells. Examples are promoters that preferentially initiate transcription in certain tissues, such as leaves, roots, seeds, fibers, xylem vessels, tracheids or sclerenchyma. Such promoters are referred to as “tissue preferred” promoters. A “cell type” specific promoter primarily drives expression in certain cell types in one or more organs, for example, vascular cells in roots or leaves. An “inducible” or “regulatable” promoter is a promoter which is under environmental control. Examples of environmental conditions that may affect transcription by inducible promoters include anaerobic conditions or the presence of light. Another type of promoter is a developmentally regulated promoter, for example, a promoter that drives expression during pollen development. Tissue preferred, cell type specific, developmentally regulated and inducible promoters are members of the class of “non-constitutive” promoters. A “constitutive” promoter is a promoter that causes a nucleic acid fragment to be expressed in most cell types at most times under most environmental conditions and states of development or cell differentiation.

[0104] Examples of pollen specific promoters that can be used include but are not limited to PG47 (Rogers et al. (1991), Pollen specific cDNA clones from Zea mays, Biochem. Biophys. Acta 1089, 411-413; Allen, R. L., and Lonsdale, D. M. (1992) Sequence analysis of three members of the maize polygalacturonase gene family expressed during pollen development, Plant Mol. Biol. 20, 343-345, Allen, R. L., and Lonsdale, D. M. (1993), Molecular characterization of one of the maize polygalacturonase gene family members which are expressed during late pollen development. The Plant Journal 3, 261-271); maize pollen-specific gene Zm13 (Hamilton et al. (1992) Plant Mol. Biol. 18:211-218; Guerrero et al. (1993) Mol. Gen. Genet. 224:161-168); microspore-specific promoters such as the apg gene promoter (Twell et al., Sex. Plant Reprod. 6:217-224 (1993)); further include a sunflower pollen-expressed gene SF3 (Baltz et al. (1992) The Plant Journal 2:713-721), B. napus pollen specific genes (Arnoldo et al. (1992) J. Cell. Biochem, Abstract No. Y101204). Such promoters are known in the art or can be discovered by known techniques; see, e.g., Bhalla and Singh (1999) Molecular control of male fertility in Brassica Proc. 10th Annual Rapeseed Congress, Canberra, Australia; van Tunen et al. (1990) Pollen-specific chi promoters from petunia: tandem promoter regulation of the chiA gene, Plant Cell 2:393-40; Jeon et al. (1999); and Twell et al. (1993) Activation and developmental regulation of an Arabidopsis anther-specific promoter in microspores and pollen of Nicotiana tabacum, Sex. Plant Reprod. 6:217-224.

[0105] In an aspect, egg cell promoters and egg cell specific promoters are useful in the methods of the present disclosure. In addition to those egg cell promoters and/or egg cell specific promoters disclosed herein and those disclosed in US2015/0152430 and US2018/0094273, each of which is incorporated herein in its entirety, egg cell promoters and/or egg cell specific promoters useful in the present disclosure include, but are not limited to the egg cell-specific EC1.1 and EC1.2 promoters disclosed in Sprunck et al., (2012) Science, 338, 1093-1097 and Steffen et al., (2007) Plant J., 51:281-92.

[0106] A “translation leader sequence” refers to a nucleotide sequence located between the promoter sequence of a gene and the coding sequence. The translation leader sequence is present in the fully processed mRNA upstream of the translation start sequence. The translation leader sequence may affect numerous parameters including, processing of the primary transcript to mRNA, mRNA stability and/or translation efficiency. Examples of translation leader sequences have been described (Turner and Foster (1995) Mol. Biotechnol. 3:225-236).

[0107] As used herein, “heterologous” refers to a nucleic acid that originates from a foreign species, or, if from the same species, is substantially modified from its native form in composition and/or genomic locus by deliberate human intervention. For example, a promoter operably linked to a heterologous structural gene that is from a species different from that from which the structural gene was derived, or, if from the same species, one or both are substantially modified from their original form and/or genomic location.

[0108] The parthenogenesis factors and morphogenic developmental genes useful in the methods of the present disclosure are provided in expression cassettes for expression in the plant of interest. The cassette includes 5′ and 3′ regulatory sequences operably linked to a parthenogenesis factor and morphogenic developmental gene sequence disclosed herein. “Operably linked” is intended to mean a functional linkage between two or more elements. For example, an operable linkage between a polynucleotide of interest and a regulatory sequence (i.e., a promoter) is a functional link that allows for expression of the polynucleotide of interest. Operably linked elements may be contiguous or non-contiguous. When used to refer to the joining of two protein coding regions (fusion proteins), by operably linked it is intended that the coding regions are in the same reading frame. The cassette may additionally contain at least one additional gene to be co-transformed into the organism. Alternatively, the parthenogenesis factor and morphogenic developmental gene(s) are provided on multiple expression cassettes. Such an expression cassette is provided with a plurality of restriction sites for insertion of the parthenogenesis factor and morphogenic developmental gene sequence to be under the transcriptional regulation of the regulatory regions (promoter(s)). The expression cassette may additionally contain selectable marker genes.

[0109] Polynucleotides useful in the methods of the present disclosure include, but are not limited to, parthenogenesis factors, morphogenic developmental genes, and cell cycle genes including Cyclin A, Cyclin B, Cyclin C, Cyclin D, Cyclin E, Cyclin F, Cyclin G, and Cyclin H; Pin1; E2F; Cdc25; RepA genes and similar plant viral polynucleotides encoding replication-associated proteins. See U.S. Patent Publication No. 2002/0188965 incorporated herein by reference in its entirety.

[0110] As used herein, a “chimeric gene expression cassette” is an expression cassette comprising a coding sequence operably linked to a transcription initiation region that is heterologous to the coding sequence and includes in the 5′-3′ direction of transcription, a transcriptional initiation region (i.e., a promoter) and translational initiation region, a secretion signal peptide, an embryogenesis inducing morphogenic developmental gene sequence, a fluorescent protein sequence, and a transcriptional and translational termination region (i.e., termination region) functional in plants.

[0111] The parthenogenesis inducing methods of the present disclosure improve maternal haploid embryo regeneration productivity and enable gene editing to provide regenerated gene-edited, maize maternal haploids.

[0112] In an aspect, haploid cells are contacted with an amount of a chromosome doubling agent to promote chromosome doubling followed by regenerating homozygous diploid plants from the treated haploid cells. The haploid microspore cells are in contact with the doubling agent before, during, or after initiation of microspore embryogenesis or embryo maturation. After chromosome doubling, the doubled haploid embryo will contain 2 copies of paternally derived chromosomes. The efficiency of the process for obtaining doubled haploid plants from haploid embryos may be greater than 10%, 20%, 30%, 50%, 60%, 70%, 80%, or 90%. The duration of contact between the haploid cells and the chromosomal doubling agent may vary. Contact may be from less than 24 hours, for example 4-12 hours, to about a week. The duration of contact is generally from about 8 hours to 2 days.

[0113] Methods of chromosome doubling are disclosed in Antoine-Michard, S. et al., Plant cell, tissue organ cult., Cordrecht, the Netherlands, Kluwer Academic Publishers, 1997, 48(3):203-207; Kato, A., Maize Genetics Cooperation Newsletter 1997, 36-37; and Wan, Y. et al., TAG, 1989, 77: 889-892. Wan, Y. et al., TAG, 1991, 81: 205-211. The disclosures of which are incorporated herein by reference. Typical doubling methods involve contacting the cells with colchicine, anti-microtubule agents or anti-microtubule herbicides, pronamide, nitrous oxide, or any mitotic inhibitor to create homozygous doubled haploid cells. The amount of colchicine used in medium is generally 0.01%-0.2% or approximately 0.05% of amiprophos-methyl (APM) (5-225 μM) may be used. The amount of colchicine ranges from approximately 400-600 mg/L or approximately 500 mg/L. The amount of pronamide in medium is approximately 0.5-20 μM. Examples of mitotic inhibitors are included in Table 1. Other agents may be used with the mitotic inhibitors to improve doubling efficiency. Such agents include dimethyl sulfoxide (DMSO), adjuvants, surfactants, and the like.

TABLE 1
Chemical chromosome doubling agents

| | | |
|---|---|---|
| Common Name/ | | |
| Trade name | CAS | IUPAC |

Colchicine and Colchicine Derivatives

| | |
|---|---|
| colchicine/ | (S)-N-(5,6,7,9-tetrahydro-1,2,3,10- |
| acetyltrimethylcolchicinic | tetramethoxy-9-oxobenzo (a) |
| acid | heptalen-7-yl) acetamide |
| colchicine derivatives | |

Carbamates

| | | |
|---|---|---|
| Carbetamide | (R)-1-(ethylcarbamoyl)ethyl | (2R)-N-ethyl-2- |
| | carbanilate | [[(phenylamino)carbonyl]oxy] |
| | | propanamide |
| chloropropham | | |
| Propham | | |

Benzamids

| | | |
|---|---|---|
| Pronamide/ | 3,5-dichloro-N-(1,1- | 3,5-dichloro-N-(1,1-dimethyl-2- |
| propyzamide | dimethylpropynyl)benzamide | propynyl)benzamide |
| Tebutam | | |

Benzoic Acids

| | | |
|---|---|---|
| Chlorthal dimethyl | | |
| (DCPA), | | |
| Dicamba/dianat/ | 3,6-dichloro-o-anisic acid | 3,6-dichloro-2-methoxybenzoic acid |
| disugran (dicamba- | | |
| methyl) (BANVEL, | | |
| CLARITY) | | |

Dinitroaniline chromosome doubling agents

| | | |
|---|---|---|
| benfluralin/benefin/ | N-butyl-N-ethyl-α,α,α- | N-butyl-N-ethyl-2,6-dinitro-4- |
| (BALAN) | trifluoro-2,6-dinitro-p- | (trifluoromethyl)benzenamine |
| | toluidine | |
| Butralin | (RS)-N-sec-butyl-4-tert- | 4-(1,1-dimethylethyl)-N-(1- |
| | butyl-2,6-dinitroaniline | methylpropyl)-2,6- |
| | | dinitrobenzenamine |
| Chloralin | | |
| dinitramine | N1,N1-diethyl-2,6-dinitro-4- | N3,N3-diethyl-2,4-dinitro-6- |
| | trifluoromethyl-m- | (trifluoromethyl)-1,3- |
| | phenylenediamine | benzenediamine |
| ethalfluralin | N-ethyl-α,α,α-trifluoro-N-(2- | N-ethyl-N-(2-methyl-2-propenyl)- |
| (Sonalan) | methylallyl)-2,6-dinitro-p- | 2,6-dinitro-4- |
| | toluidine | (trifluoromethyl)benzenamine |
| fluchloralin | N-(2-chloroethyl)-2,6- | N-(2-chloroethyl)-2,6-dinitro-N- |
| | dinitro-N-propyl-4- | propyl-4- |
| | (trifluoromethyl)aniline | (trifluoromethyl)benzenamine |
| | or | |
| | N-(2-chloroethyl)-α,α,α- | |
| | trifluoro-2,6-dinitro-N- | |
| | propyl-p-toluidine | |
| isopropalin | 4-isopropyl-2,6-dinitro-N,N- | 4-(1-methylethyl)-2,6-dinitro-N,N- |
| | dipropylaniline | dipropylbenzenamine |
| methalpropalin | α,α,α-trifluoro-N-(2- | N-(2-methyl-2-propeny1)-2,6- |
| | methylallyl)-2,6-dinitro-N- | dinitro-N-propyl-4- |
| | propyl-p-toluidine | (trifluoromethyl)benzenamine |
| nitralin | 4-methylsulfonyl-2,6-dinitro- | 4-(methylsulfonyl)-2,6-dinitro-N,N- |
| | N,N-dipropylaniline | dipropylbenzenamine |
| oryzalin | 3,5-dinitro-N4,N4- | 4-(dipropylamino)-3,5- |
| (SURFLAN) | dipropylsulfanilamide | dinitrobenzenesulfonamide |
| pendimethalin | N-(1-ethylpropyl)-2,6- | N-(1-ethylpropyl)-3,4-dimethyl-2,6- |
| (PROWL) | dinitro-3,4-xylidine | dinitrobenzenamine |
| prodiamine | 5-dipropylamino-α,α,α- | 2,4-dinitro-N3,N3-dipropyl-6- |
| | trifluoro-4,6-dinitro-o- | (trifluoromethyl)-1,3- |
| | toluidine | benzenediamine |
| | or | |
| | 2,6-dinitro-N1,N1-dipropyl- | |
| | 4-trifluoromethyl-m- | |
| | phenylenediamine | |
| profluralin | N-cyclopropylmethyl-α,α,α- | N-(cyclopropylmethyl)-2,6-dinitro- |
| | trifluoro-2,6-dinitro-N- | N-propyl-4- |
| | propyl-p-toluidine | (trifluoromethyl)benzenamine |
| | or | |
| | N-cyclopropylmethyl-2,6- | |
| | dinitro-N-propyl-4- | |
| | trifluoromethylaniline | |
| trifluralin (TREFLAN, | α,α,α-trifluoro-2,6-dinitro- | 2,6-dinitro-N,N-dipropy1-4- |
| TRIFIC, TRILLIN) | N,N-dipropyl-p-toluidine | (trifluoromethyl)benzenamine |

Phosphoroamidates

| | | |
|---|---|---|
| APM (Amiprofos | | |
| methyl); amiprophos- | | |
| methyl | | |
| Butamifos | O-ethyl O-6-nitro-m-tolyl | O-ethyl O-(5-methyl-2-nitrophenyl) |
| | (RS)-sec- | (1- |
| | butylphosphoramidothioate | methylpropyl)phosphoramidothioate |

Pyridines
Dithiopyr

| | | |
|---|---|---|
| Thiazopyr | methyl 2-difluoromethyl-5- | methyl 2-(difluoromethyl)-5-(4,5- |
| | (4,5-dihydro-1,3-thiazol-2- | dihydro-2-thiazoly1)-4-(2- |
| | yl)-4-isobutyl-6- | methylpropyl)-6-(trifluoromethyl)-3- |
| | trifluoromethylnicotinate | pyridinecarboxylate |

[0114] As an alternative to using chemical chromosome doubling agents, modulating expression of genes that impact the plant cell cycle (genetic chromosome doubling protein), either through stimulation of the cell cycle (and cell division) or through stimulation of endoreduplication is used to double the chromosome complement in an embryo. Increasing ploidy level in plant cells is achieved by modulating expression of genes that stimulate key control points in the cell cycle cell. It has been demonstrated that expression of parthenogenic factors using an egg cell promoter enhanced formation of maternal haploid embryos, while simultaneous expression of parthenogenic factors and ZM-DZ470 (a maize cyclin-D family member) not only resulted in maternal haploid embryo formation but also stimulated doubling of the chromosome number. Thus, the addition of cyclin-D over-expression in the forming maternal haploid embryo appears to provide an appropriate level of cell cycle stimulation to result in doubling of the 1n haploid chromosome number to 2n (diploid). It is expected that other plant genes that simulate the cell cycle (or cell division) in plants are useful to produce a similar doubling of the chromosome number in the forming maternal haploid embryos. It is expected that these genes will be useful in the methods of the present disclosure in providing genetic chromosome doubling activity to the maternal haploid embryo from the male gamete of the double haploid inducer. Examples of plant genes whose over-expression stimulates the cell cycle include cyclin-A in tobacco (Yu et al., 2003), cyclin-D in tobacco (Cockcroft et al., 2000, Nature 405:575-79; Schnittger et al., 2002, PNAS 99:6410-6415; Dewitte et al., 2003, Plant Cell 15:79-92)., E2FA in Arabidopsis (De Veylder et al., 2002, EMBO J 21:1360-1368), E2FB in Arabidopsis (Magyar et al., 2005, Plant Cell 17:2527-2541). Similarly, over-expression of viral genes that modulate plant cell cycle machinery are used, such as when over-expression of the Wheat Dwarf Virus RepA gene stimulates cell cycle progression (G1/S transition) and cell division in maize (Gordon-Kamm et al., 2002, PNAS 99:11975-11980). Conversely, plant genes whose encoded products inhibit the cell cycle have been shown to result in increased cell division when the gene, such as Cyclin-Dependent Kinase Inhibitor (ICK1/KRP), is down-regulated in Arabidopsis (Cheng et al 2013, Plant J 75:642-655). Thus, down-regulation of the KRP gene using an egg cell specific promoter to drive expression would be expected to have a similar effect as over-expression of DZ470, resulting in chromosome doubling. Methods of down-regulation of a gene such as KRP include expression of an artificial micro-RNA targeted to the KRP mRNA, or expression of a dCas9-repressor fusion that is targeted to the KRP promoter by a gRNA to that sequence. Finally, there are plant genes that specifically impact the process of endoreduplication. When using such genes, such as for example the ccs52gene or the Dell gene, in the methods of the present disclosure, it is expected that over-expression of ccs52 would result in an increased ploidy level as observed in Medicago sativa (Cebolla et al., 1999, EMBO J 18:4476-4484), and that down-regulation of Dell would result in an increased ploidy level as observed in Arabidopsis (Vlieghe et al., 2005, Current Biol 15:59-63). It is expected that other genes that stimulate the cell cycle, the G1/S transition, or endoreduplication are useful in the methods disclosed herein to increase ploidy level.

[0115] Repressor motifs, for example see Kagale and Rozwadowski (Epigenetics. 2011. 6: 141-146), are useful in the methods of the present disclosure. Ethylene-responsive element binding factor-associated Amphiphilic Repression (EAR) motif-mediated transcriptional repression, including EAR motifs defined by the consensus sequence patterns of either LxLxL and DLNxxP (see Hiratsu et al., 2003. Plant J. 35:177-192) are useful in the methods of the present disclosure. Of interest to the present disclosure are peptides including the amphiphilic repression motif disclosed in U.S. Pat. No. 9,499,831, incorporated herein by reference in its entirety, and the Dr1/DRAP1 global repressor complex (see U.S. Pat. No. 7,288,695 B2 incorporated herein by reference in its entirety), including the Dr1 motif that is similar to the motif found in Arabidopsis thaliana MYBL2 (see Matsui K, Umemura Y, Ohme-Takagi M. 2008. Plant J. 55:954-967).

[0116] Methods for creating haploid inducer lines, for example by ectopically expressing AP2 domain containing transcription factors. For example, preferably the method of Gordon-Kamm et al. was used (see U.S. Pat. No. 7,579,529; incorporated herein by reference in its entirety) are useful in the methods of the present disclosure.

[0117] Of interest to the current method is expression of the full length ZM-ODP2 peptide as described previously (see U.S. Pat. No. 7,579,529; incorporated herein by reference in its entirety) which induces parthenogenesis and embryo formation without fertilization when used in the methods disclosed herein. Additionally, the Pennisetum squamulatum AP2 transcription factor, Apospory-Specific-Genomic-Region BabyBoomLike (herein referred to as PsASGR-BBML) transgene induces parthenogenesis and embryo formation without fertilization. In maize, individuals with a PsASGR-BBML transgene fertilized with pollen having the R1-navajo anthocyanin color markers exhibited haploid embryo production (Steffen J G, et al. 2007. Plant J 51:281-292, US2016/0304901 A1, herein incorporated by reference in their entirety). More recently, the method of Khanday and Sundaresan demonstrated similar findings, for example in rice (see WO2018/098420 A1; incorporated herein by reference in its entirety).

[0118] Methods for the targeted insertion of a polynucleotide at a specific location in the plant genome are useful in the methods of the present disclosure. The insertion of the polynucleotide at a desired genomic location is achieved using a site-specific recombination system. See, for example, U.S. Pat. Nos. 6,187,994, 6,331,661, 6,262,341, 6,300,545 and 6,528,700, all of which are herein incorporated by reference in their entireties. Briefly, a polynucleotide of interest, flanked by two non-identical recombination sites, are contained in a T-DNA transfer cassette. The T-DNA transfer cassette is introduced into a plant having stably incorporated into its genome a target site which is flanked by two non-identical recombination sites that correspond to the sites of the transfer cassette. An appropriate recombinase is provided, and the transfer cassette is integrated at the target site. The polynucleotide of interest is thereby integrated at a specific chromosomal position in the plant genome.

[0119] The disclosed methods are used to introduce into explants polynucleotides that are useful to target a specific site for modification in the genome of a plant derived from the explant. Site specific modifications that are introduced with the disclosed methods include those produced using any method for introducing site specific modification, including, but not limited to, through the use of gene repair oligonucleotides (e.g. US Publication 2013/0019349), or through the use of double-stranded break technologies such as TALENs, meganucleases, zinc finger nucleases, CRISPR-Cas, and the like. For example, the disclosed methods are used to introduce a CRISPR-Cas system into a plant cell or plant, for the purpose of genome modification of a target sequence in the genome of a plant or plant cell, for selecting plants, for deleting a base or a sequence, for gene editing, and for inserting a polynucleotide of interest into the genome of a plant or plant cell. Thus, the disclosed methods are used together with a CRISPR-Cas system to provide for an effective system for modifying or altering target sites and nucleotides of interest within the genome of a plant, plant cell or seed. The Cas endonuclease gene is a plant optimized Cas9 endonuclease, wherein the plant optimized Cas9 endonuclease is capable of binding to and creating a double strand break in a genomic target sequence of the plant genome.

[0120] The Cas endonuclease is guided by the guide nucleotide to recognize and optionally introduce a double strand break at a specific target site into the genome of a cell. The CRISPR-Cas system provides for an effective system for modifying target sites within the genome of a plant, plant cell or seed. Further provided are methods employing a guide polynucleotide/Cas endonuclease system to provide an effective system for modifying target sites within the genome of a cell and for editing a nucleotide sequence in the genome of a cell. Once a genomic target site is identified, a variety of methods are employed to further modify the target sites such that they contain a variety of polynucleotides of interest. The disclosed methods are used to introduce a CRISPR-Cas system for editing a nucleotide sequence in the genome of a cell. The nucleotide sequence to be edited (the nucleotide sequence of interest) is located within or outside a target site that is recognized by a Cas endonuclease.

[0121] CRISPR loci (Clustered Regularly Interspaced Short Palindromic Repeats) (also known as SPIDRs-SPacer Interspersed Direct Repeats) constitute a family of recently described DNA loci. CRISPR loci consist of short and highly conserved DNA repeats (typically 24 to 40 bp, repeated from 1 to 140 times—also referred to as CRISPR-repeats) which are partially palindromic. The repeated sequences (usually specific to a species) are interspaced by variable sequences of constant length (typically 20 to 58 by depending on the CRISPR locus (WO2007/025097 published Mar. 1, 2007).

[0122] Cas gene includes a gene that is generally coupled, associated or close to or in the vicinity of flanking CRISPR loci. The terms “Cas gene” and “CRISPR-associated (Cas) gene” are used interchangeably herein.

[0123] In another aspect, the Cas endonuclease gene is operably linked to a SV40 nuclear targeting signal upstream of the Cas codon region and a bipartite VirD2 nuclear localization signal (Tinland et al. (1992) Proc. Natl. Acad. Sci. USA 89:7442-6) downstream of the Cas codon region.

[0124] As related to the Cas endonuclease, the terms “functional fragment,” “fragment that is functionally equivalent,” and “functionally equivalent fragment” are used interchangeably herein. These terms refer to a portion or subsequence of the Cas endonuclease sequence in which the ability to create a double-strand break is retained.

[0125] As related to the Cas endonuclease, the terms “functional variant,” “variant that is functionally equivalent” and “functionally equivalent variant” are used interchangeably herein. These terms refer to a variant of the Cas endonuclease in which the ability to create a double-strand break is retained. Fragments and variants are obtained via methods such as site-directed mutagenesis and synthetic construction.

[0126] In an aspect, the Cas endonuclease gene is a plant codon optimized Streptococcus pyogenes Cas9 gene that recognizes any genomic sequence of the form N(12-30)NGG which is in principle targeted.

[0127] Endonucleases are enzymes that cleave the phosphodiester bond within a polynucleotide chain and include restriction endonucleases that cleave DNA at specific sites without damaging the bases. Restriction endonucleases include Type I, Type II, Type III, and Type IV endonucleases, which further include subtypes. In the Type I and Type III systems, both the methylase and restriction activities are contained in a single complex. Endonucleases also include meganucleases, also known as homing endonucleases (HEases), which like restriction endonucleases, bind and cut at a specific recognition site, however the recognition sites for meganucleases are typically longer, about 18 bp or more (Patent application PCT/US 12/30061 filed on Mar. 22, 2012). Meganucleases have been classified into four families based on conserved sequence motifs. These motifs participate in the coordination of metal ions and hydrolysis of phosphodiester bonds. Meganucleases are notable for their long recognition sites, and for tolerating some sequence polymorphisms in their DNA substrates. The naming convention for meganuclease is similar to the convention for other restriction endonuclease. Meganucleases are also characterized by prefix F-, I-, or PI- for enzymes encoded by free-standing ORFs, introns, and inteins, respectively. One step in the recombination process involves polynucleotide cleavage at or near the recognition site. This cleaving activity is used to produce a double-strand break. For reviews of site-specific recombinases and their recognition sites, see, Sauer (1994) Curr Op Biotechnol 5:521-7; and Sadowski (1993) FASEB 7:760-7. In some examples the recombinase is from the Integrase or Resolvase families. TAL effector nucleases are a new class of sequence-specific nucleases that are used to make double-strand breaks at specific target sequences in the genome of a plant or other organism. (Miller, et al. (2011) Nature Biotechnology 29:143-148). Zinc finger nucleases (ZFNs) are engineered double-strand break inducing agents comprised of a zinc finger DNA binding domain and a double-strand-break-inducing agent domain. Recognition site specificity is conferred by the zinc finger domain, which typically comprising two, three, or four zinc fingers, for example having a C2H2 structure, however other zinc finger structures have been engineered. Zinc finger domains are amenable for designing polypeptides which specifically bind a selected polynucleotide recognition sequence. ZFNs include an engineered DNA-binding zinc finger domain linked to a nonspecific endonuclease domain, for example nuclease domain from a Type Ms endonuclease such as Fokl. Additional functionalities are fused to the zinc-finger binding domain, including transcriptional activator domains, transcription repressor domains, and methylases. In some examples, dimerization of nuclease domain is required for cleavage activity. Each zinc finger recognizes three consecutive base pairs in the target DNA. For example, a 3-finger domain recognized a sequence of 9 contiguous nucleotides, with a dimerization requirement of the nuclease, two sets of zinc finger triplets are used to bind an 18-nucleotide recognition sequence.

[0128] A “Dead-CAS9” (dCAS9) as used herein, is used to supply a transcriptional repressor domain. The dCAS9 has been mutated so that it no longer cuts DNA. The dCAS0 still binds when guided to a sequence by the gRNA and are also be fused to repressor elements. The dCAS9 fused to the repressor element, as described herein, is abbreviated to dCAS9˜REP, where the repressor element (REP) is any of the repressor motifs that have been characterized in plants. An expressed guide RNA (gRNA) binds to the dCAS9˜REP protein and targets the binding of the dCAS9-REP fusion protein to a specific predetermined nucleotide sequence within a promoter (a promoter within the T-DNA). For example, if this is expressed beyond—the border using a ZM-UBI PRO::dCAS9˜REP::PINII TERM cassette along with a U6-POL PRO::gRNA::U6 TERM cassette and the gRNA is designed to guide the dCAS9-REP protein to bind the SB-UBI promoter in the expression cassette SB-UBI PRO::moPAT::PINII TERM within the T-DNA, any event that has integrated the beyond-the-border sequence would be bialaphos sensitive. Transgenic events that integrate only the T-DNA would express moPAT and be bialaphos resistant. The advantage of using a dCAS9 protein fused to a repressor (as opposed to a TETR or ESR) is the ability to target these repressors to any promoter within the T-DNA. TETR and ESR are restricted to cognate operator binding sequences. Alternatively, a synthetic Zinc-Finger Nuclease fused to a repressor domain is used in place of the gRNA and dCAS9˜REP (Urritia et al., 2003, Genome Biol. 4:231) as described above.

[0129] The type II CRISPR/Cas system from bacteria employs a crRNA and tracrRNA to guide the Cas endonuclease to its DNA target. The crRNA (CRISPR RNA) contains the region complementary to one strand of the double strand DNA target and base pairs with the tracrRNA (trans-activating CRISPR RNA) forming a RNA duplex that directs the Cas endonuclease to cleave the DNA target. As used herein, the term “guide nucleotide” relates to a synthetic fusion of two RNA molecules, a crRNA (CRISPR RNA) comprising a variable targeting domain, and a tracrRNA. In an aspect, the guide nucleotide comprises a variable targeting domain of 12 to 30 nucleotide sequences and a RNA fragment that interacts with a Cas endonuclease.

[0130] As used herein, the term “guide polynucleotide” relates to a polynucleotide sequence that forms a complex with a Cas endonuclease and enables the Cas endonuclease to recognize and optionally cleave a DNA target site. The guide polynucleotide is a single molecule or a double molecule. The guide polynucleotide sequence is a RNA sequence, a DNA sequence, or a combination thereof (a RNA-DNA combination sequence). Optionally, the guide polynucleotide comprises at least one nucleotide, phosphodiester bond or linkage modification such as, but not limited, to Locked Nucleic Acid (LNA), 5-methyl dC, 2,6-Diaminopurine, 2′-Fluoro A, 2′-Fluoro U, 2′-O-Methyl RNA, phosphorothioate bond, linkage to a cholesterol molecule, linkage to a polyethylene glycol molecule, linkage to a spacer 18 (hexaethylene glycol chain) molecule, or 5′ to 3′ covalent linkage resulting in circularization. A guide polynucleotide that solely comprises ribonucleic acids is also referred to as a “guide nucleotide”.

[0131] Nucleotide sequence modification of the guide polynucleotide, VT domain and/or CER domain is selected from, but not limited to, the group consisting of a 5′ cap, a 3′ polyadenylated tail, a riboswitch sequence, a stability control sequence, a sequence that forms a dsRNA duplex, a modification or sequence that targets the guide poly nucleotide to a subcellular location, a modification or sequence that provides for tracking, a modification or sequence that provides a binding site for proteins, a Locked Nucleic Acid (LNA), a 5-methyl dC nucleotide, a 2,6-Diaminopurine nucleotide, a 2′-Fluoro A nucleotide, a 2′-Fluoro U nucleotide; a 2′-O-Methyl RNA nucleotide, a phosphorothioate bond, linkage to a cholesterol molecule, linkage to a polyethylene glycol molecule, linkage to a spacer 18 molecule, a 5′ to 3′ covalent linkage, or any combination thereof. These modifications result in at least one additional beneficial feature, wherein the additional beneficial feature is selected from the group of a modified or regulated stability, a subcellular targeting, tracking, a fluorescent label, a binding site for a protein or protein complex, modified binding affinity to complementary target sequence, modified resistance to cellular degradation, and increased cellular permeability.

[0132] In an aspect, the guide nucleotide and Cas endonuclease are capable of forming a complex that enables the Cas endonuclease to introduce a double strand break at a DNA target site.

[0133] In an aspect of the present disclosure the variable target domain is 12, 13, 14, 15, 16, 17, 18, 19, 20, 21, 22, 23, 24, 25, 26, 27, 28, 29 or 30 nucleotides in length.

[0134] In an aspect of the present disclosure, the guide nucleotide comprises a cRNA (or cRNA fragment) and a tracrRNA (or tracrRNA fragment) of the type II CRISPR/Cas system that forms a complex with a type II Cas endonuclease, wherein the guide nucleotide Cas endonuclease complex directs the Cas endonuclease to a plant genomic target site, enabling the Cas endonuclease to introduce a double strand break into the genomic target site. The guide nucleotide is introduced into a plant or plant cell directly using any method including, but not limited to, particle bombardment or topical applications.

[0135] In an aspect, the guide nucleotide is introduced indirectly by introducing a recombinant DNA molecule comprising the corresponding guide DNA sequence operably linked to a plant specific promoter that is capable of transcribing the guide nucleotide in the plant cell. The term “corresponding guide DNA” includes a DNA molecule that is identical to the RNA molecule but has a “T” substituted for each “U” of the RNA molecule.

[0136] In an aspect, the guide nucleotide is introduced via particle bombardment or using the disclosed methods for Agrobacterium transformation of a recombinant DNA construct comprising the corresponding guide DNA operably linked to a plant U6 polymerase III promoter.

[0137] In an aspect, the RNA that guides the RNA Cas9 endonuclease complex, is a duplexed RNA comprising a duplex crRNA-tracrRNA. One advantage of using a guide nucleotide versus a duplexed crRNA-tracrRNA is that only one expression cassette needs to be made to express the fused guide nucleotide.

[0138] The terms “target site,” “target sequence,” “target DNA,” “target locus,” “genomic target site,” “genomic target sequence,” and “genomic target locus” are used interchangeably herein and refer to a polynucleotide sequence in the genome (including choloroplastic and mitochondrial DNA) of a plant cell at which a double-strand break is induced in the plant cell genome by a Cas endonuclease. The target site is an endogenous site in the plant genome, or alternatively, the target site is heterologous to the plant and thereby not be naturally occurring in the genome, or the target site is found in a heterologous genomic location compared to where it occurs in nature.

[0139] As used herein, terms “endogenous target sequence” and “native target sequence” are used interchangeably herein to refer to a target sequence that is endogenous or native to the genome of a plant and is at the endogenous or native position of that target sequence in the genome of the plant.

[0140] An “artificial target site” or “artificial target sequence” are used interchangeably herein and refer to a target sequence that has been introduced into the genome of a plant. Such an artificial target sequence is identical in sequence to an endogenous or native target sequence in the genome of a plant but is located in a different position (i.e., a non-endogenous or non-native position) in the genome of a plant.

[0141] An “altered target site,” “altered target sequence” “modified target site,” and “modified target sequence” are used interchangeably herein and refer to a target sequence as disclosed herein that comprises at least one alteration when compared to non-altered target sequence. Such “alterations” include, for example: (i) replacement of at least one nucleotide, (ii) a deletion of at least one nucleotide, (iii) an insertion of at least one nucleotide, or (iv) any combination of (i)-(iii).

[0142] In an aspect, the disclosed methods are used to introduce into plants polynucleotides useful for gene suppression of a target gene in a plant. Reduction of the activity of specific genes (also known as gene silencing, or gene suppression) is desirable for several aspects of genetic engineering in plants. Techniques for gene silencing include, but not limited to antisense technology.

[0143] In an aspect, the disclosed methods are used to introduce into plants polynucleotides useful for the targeted integration of nucleotide sequences into a plant. For example, the disclosed methods are used to introduce T-DNA expression cassettes comprising nucleotide sequences of interest flanked by non-identical recombination sites are used to transform a plant comprising a target site. In an aspect, the target site contains at least a set of non-identical recombination sites corresponding to those on the T-DNA expression cassette. The exchange of the nucleotide sequences flanked by the recombination sites is affected by a recombinase. Thus, the disclosed methods are used for the introduction of T-DNA expression cassettes for targeted integration of nucleotide sequences, wherein the T-DNA expression cassettes which are flanked by non-identical recombination sites recognized by a recombinase that recognizes and implements recombination at the nonidentical recombination sites. Accordingly, the disclosed methods and composition are used to improve efficiency and speed of development of plants containing non-identical recombination sites.

[0144] Thus, the disclosed methods further comprise methods for the directional, targeted integration of exogenous nucleotides into a transformed plant. In an aspect, the disclosed methods use recombination sites in a gene targeting system which facilitates directional targeting of desired genes and nucleotide sequences into corresponding recombination sites previously introduced into the target plant genome.

[0145] In an aspect, a nucleotide sequence flanked by two non-identical recombination sites is introduced into one or more cells of an explant derived from the target organism's genome establishing a target site for insertion of nucleotide sequences of interest. Once a stable plant or cultured tissue is established a second construct, or nucleotide sequence of interest, flanked by corresponding recombination sites as those flanking the target site, is introduced into the stably transformed plant or tissues in the presence of a recombinase protein. This process results in exchange of the nucleotide sequences between the non-identical recombination sites of the target site and the T-DNA expression cassette.

[0146] It is recognized that the transformed plant prepared in this manner may comprise multiple target sites; i. e., sets of non-identical recombination sites. In this manner, multiple manipulations of the target site in the transformed plant are available. By target site in the transformed plant is intended a DNA sequence that has been inserted into the transformed plant's genome and comprises non-identical recombination sites.

[0147] The two-micron plasmid found in most naturally occurring strains of Saccharomyces cerevisiae, encodes a site-specific recombinase that promotes an inversion of the DNA between two inverted repeats. This inversion plays a central role in plasmid copy-number amplification.

[0148] The protein, designated FLP protein, catalyzes site-specific recombination events. The minimal recombination site (FRT) has been defined and contains two inverted 13-base pair (bp) repeats surrounding an asymmetric 8-bp spacer. The FLP protein cleaves the site at the junctions of the repeats and the spacer and is covalently linked to the DNA via a 3′phosphate. Site specific recombinases like FLP cleave and religate DNA at specific target sequences, resulting in a precisely defined recombination between two identical sites. To function, the system needs the recombination sites and the recombinase. No auxiliary factors are needed. Thus, the entire system inserted into and functions in plant cells. The yeast FLP\FRT site specific recombination system has been shown to function in plants. To date, the system has been utilized for excision of unwanted DNA. See, Lyznik et at. (1993) Nucleic Acid Res. 21: 969-975. In contrast, the present disclosure utilizes non-identical FRTs for the exchange, targeting, arrangement, insertion and control of expression of nucleotide sequences in the plant genome.

[0149] In an aspect, a transformed organism of interest, such as an explant from a plant, containing a target site integrated into its genome is needed. The target site is characterized by being flanked by non-identical recombination sites. A targeting cassette is additionally required containing a nucleotide sequence flanked by corresponding non-identical recombination sites as those sites contained in the target site of the transformed organism. A recombinase which recognizes the non-identical recombination sites and catalyzes site-specific recombination is required.

[0150] It is recognized that the recombinase is provided by any means including, but not limited to, providing to the organism or plant cell by transforming the organism with an expression cassette capable of expressing the recombinase in the organism, by transient expression, or by providing messenger RNA (mRNA) for the recombinase or the recombinase protein.

[0151] By “non-identical recombination sites” it is intended that the flanking recombination sites are not identical in sequence and will not recombine or recombination between the sites will be minimal. That is, one flanking recombination site may be a FRT site where the second recombination site may be a mutated FRT site. The non-identical recombination sites used in the methods of the present disclosure prevent or greatly suppress recombination between the two flanking recombination sites and excision of the nucleotide sequence contained therein. Accordingly, it is recognized that any suitable non-identical recombination sites may be utilized in the present disclosure, including FRT and mutant FRT sites, FRT and lox sites, lox and mutant lox sites.

[0152] By suitable non-identical recombination site implies that in the presence of active recombinase, excision of sequences between two non-identical recombination sites occurs, if at all, with an efficiency considerably lower than the recombinationally-mediated exchange targeting arrangement of nucleotide sequences into the plant genome. Thus, suitable non-identical sites for use in the present disclosure include those sites where the efficiency of recombination between the sites is low; for example, where the efficiency is less than about to about 50%, preferably less than about 10 to about 30%, more preferably less than about to about 10%.

[0153] As noted above, the recombination sites in the targeting cassette correspond to those in the target site of the transformed plant. That is, if the target site of the transformed plant contains flanking non-identical recombination sites of FRT and a mutant FRT, the targeting cassette will contain the same FRT and mutant FRT non-identical recombination sites.

[0154] It is furthermore recognized that the recombinase, which is used in the disclosed methods, will depend upon the recombination sites in the target site of the transformed plant and the targeting cassette. That is, if FRT sites are utilized, the FLP recombinase will be needed. In the same manner, where lox sites are utilized, the Cre recombinase is required. If the non-identical recombination sites comprise both a FRT and a lox site, both the FLP and Cre recombinase will be required in the plant cell.

[0155] The FLP recombinase is a protein which catalyzes a site-specific reaction that is involved in amplifying the copy number of the two-micron plasmid of S. cerevisiae during DNA replication. FLP protein has been cloned and expressed. See, for example, Cox (1993) Proc. Natl. Acad. Sci. U.S.A. 80: 4223-4227. The FLP recombinase for use in the present disclosure may be that derived from the genus Saccharomyces. It may be preferable to synthesize the recombinase using plant preferred codons for optimum expression in a plant of interest. See, for example, U.S. application Ser. No. 08/972,258 filed Nov. 18, 1997, entitled “Novel Nucleic Acid Sequence Encoding FLP Recombinase,” herein incorporated by reference.

[0156] The bacteriophage recombinase Cre catalyzes site-specific recombination between two lox sites. See, for example, Guo et al. (1997) Nature 389: 40-46; Abremski et al. (1984) J. Biol. Chem. 259: 1509-1514; Chen et al. (1996) Somat. Cell Mol. Genet. 22: 477-488; and Shaikh et al. (1977) J. Biol. Chem. 272: 5695-5702. All of which are herein incorporated by reference. Such Cre sequence may also be synthesized using plant preferred codons.

[0157] Where appropriate, the nucleotide sequences to be inserted in the plant genome may be optimized for increased expression in the transformed plant. Where mammalian, yeast, or bacterial genes are used in the present disclosure, they are synthesized using plant preferred codons for improved expression. It is recognized that for expression in monocots, dicot genes are also synthesized using monocot preferred codons. See, for example, U.S. Pat. Nos. 5,380,831, and 5,436,391, and Murray et al. (1989) Nucleic Acids Res. 17: 477-498, herein incorporated by reference for methods of synthesizing plant preferred genes. The plant preferred codons may be determined from the codons utilized more frequently in the proteins expressed in the plant of interest. It is recognized that monocot or dicot preferred sequences may be constructed as well as plant preferred sequences for particular plant species. See, for example, EP 0359472; EP 0385962; WO 91/16432; Perlak et al. (1991) Proc. Natl. Acad. Sci. USA, 88: 3324-3328; and Murray et al. (1989) Nucleic Acids Research, 17: 477-498. U.S. Pat. Nos. 5,380,831; 5,436,391; and the like, herein incorporated by reference. It is further recognized that all or any part of the gene sequence may be optimized or synthetic. That is, fully optimized or partially optimized sequences may also be used.

[0158] Additional sequence modifications that enhance gene expression in a cellular host are used in the present disclosure. These include elimination of sequences encoding spurious polyadenylation signals, exon-intron splice site signals, transposon-like repeats, and other such well-characterized sequences, which may be deleterious to gene expression. The G-C content of the sequence may be adjusted to levels average for a given cellular host, as calculated by reference to known genes expressed in the host cell. When possible, the sequence is modified to avoid predicted hairpin secondary RNA structures.

[0159] The present disclosure also encompasses FLP recombination target sites (FRT). The FRT has been identified as a minimal sequence comprising two 13 base pair repeats, separated by an eight (8) base spacer. The nucleotides in the spacer region are replaced with a combination of nucleotides, so long as the two 13-base repeats are separated by eight nucleotides. It appears that the actual nucleotide sequence of the spacer is not critical; however, for the practice of the present disclosure, some substitutions of nucleotides in the space region may work better than others. The eight-base pair spacer is involved in DNA-DNA pairing during strand exchange. The asymmetry of the region determines the direction of site alignment in the recombination event, which will subsequently lead to either inversion or excision. As indicated above, most of the spacer is mutated without a loss of function. See, for example, Schlake and Bode (1994) Biochemistry 33: 12746-12751, herein incorporated by reference.

[0160] FRT mutant sites are useful in the practice of the disclosed methods (see SEQ ID NO: 2, 3, 4 and 5 of U.S. Pat. No. 7,820,880, incorporated herein by reference in its entirety). Other mutant sites may be constructed by PCR-based mutagenesis for use in the methods of the present disclosure. The present disclosure is not restricted to the use of a particular FRT or recombination site, but rather that non-identical recombination sites or FRT sites are utilized for targeted insertion and expression of nucleotide sequences in a plant genome. Thus, other mutant FRT sites are constructed and utilized based upon the present disclosure.

[0161] As discussed above, bringing genomic DNA containing a target site with non-identical recombination sites together with a vector containing a T-DNA expression cassette with corresponding non-identical recombination sites, in the presence of the recombinase, results in recombination. The nucleotide sequence of the T-DNA expression cassette located between the flanking recombination sites is exchanged with the nucleotide sequence of the target site located between the flanking recombination sites. In this manner, nucleotide sequences of interest may be precisely incorporated into the genome of the host. Target sites are constructed having multiple non-identical recombination sites. Thus, multiple genes or nucleotide sequences are stacked or ordered at precise locations in the plant genome. Likewise, once a target site has been established within the genome, additional recombination sites may be introduced by incorporating such sites within the nucleotide sequence of the T-DNA expression cassette and the transfer of the sites to the target sequence. Thus, once a target site has been established, it is possible to subsequently add sites, or alter sites through recombination.

[0162] Another variation includes providing a promoter or transcription initiation region operably linked with the target site in an organism. Preferably, the promoter will be 5′ to the first recombination site. By transforming the organism with a T-DNA expression cassette comprising a coding region, expression of the coding region will occur upon integration of the T-DNA expression cassette into the target site. This aspect provides for a method to select transformed cells, particularly plant cells, by providing a selectable marker sequence as the coding sequence.

[0163] Other advantages of the present system include the ability to reduce the complexity of integration of transgenes or transferred DNA in an organism by utilizing T-DNA expression cassettes as discussed above and selecting organisms with simple integration patterns. In the same manner, preferred sites within the genome are identified by comparing several transformation events. A preferred site within the genome includes one that does not disrupt expression of essential sequences and provides for adequate expression of the transgene sequence.

[0164] The following examples are offered by way of illustration and not by way of limitation.

### EXAMPLES

[0165] The aspects of the present disclosure are further defined in the following Examples, in which parts and percentages are by weight and degrees are Celsius, unless otherwise stated. These Examples, while indicating aspects of the present disclosure, are given by way of illustration only. From the above discussion and these Examples, one skilled in the art can ascertain the essential characteristics of the aspects of the present disclosure, and without departing from the spirit and scope thereof, can make various changes and modifications of them to adapt to various usages and conditions. Thus, various modifications in addition to those shown and described herein will be apparent to those skilled in the art from the foregoing description. Such modifications are also intended to fall within the scope of the appended claims.

### Example 1: Plasmids

[0166] See Table 2 for a description of plasmids useful in the present disclosure.

TABLE 2

| SEQ | | |
|---|---|---|
| ID | | |
| NO: | Plasmid | Plasmid Elements |
| 29 | RV044054 | RB + SB-ALS PRO::ZM-ALS (HRA) EXON1::ST-LS1 INTRON2 |
| | | FRAG1 + LOXP + ZM-AXIG1 1XOP-B PRO-V1::ZM-WUS2 |
| | | (CDNA)::IN2-1 TERM + AT-5-IV-2 INS + ATTB1 + ZM-PLTP |
| | | PRO::ZM-PLTP 5 UTR::ZM-ODP2 (ALT1)::OS-T28 TERM::PINII |
| | | TERM::CZ19B1 TERM + ALL STOPS2 + ZM-GLB1 PRO::MO- |
| | | CRE EXON1::ST-LS1 INTRON2-V2::MO-CRE EXON2::PINII |
| | | TERM-V3 + SB-UBI PRO::SB-UBI INTRON1::ZS-GREEN1::OS- |
| | | UBI TERM + MINI-ALLSTOPS + LOXP + ZM-ALS (HRA) |
| | | EXON2::SB-PEPC1 TERM (MOD1) + ZM-BBM2 PRO:: ZM- |
| | | BBM2 5UTR::ZM-CYCD2::PINII TERM + UBI1ZM |
| | | PRO::UBI1ZM 5UTR(PHI)::UBI1ZM INTRON1(PHI)::Ds- |
| | | RED2::PINII TERM + LB |
| 30 | RX000002 | RB + SB-ALS PRO::ZM-ALS (HRA) EXON1::ST-LS1 INTRON2 |
| | | FRAG1 + LOXP + ZM-AXIG1 1XOP-B PRO-V1::ZM-WUS2 |
| | | (CDNA)::IN2-1 TERM + AT-5-IV-2 INS + ATTB1 + ZM-PLTP |
| | | PRO::ZM-PLTP 5 UTR::ZM-ODP2 (ALT1)::OS-T28 TERM::PINII |
| | | TERM::CZ19B1 TERM + ALL STOPS2 + ZM-GLB1 PRO::MO- |
| | | CRE EXON1::ST-LS1 INTRON2-V2::MO-CRE EXON2::PINII |
| | | TERM-V3 + SB-UBI PRO::SB-UBI INTRON1::ZS-GREEN1::OS- |
| | | UBI TERM + MINI-ALLSTOPS + LOXP + ZM-ALS (HRA) |
| | | EXON2::SB-PEPC1 TERM (MOD1) + ZM-BBM2 PRO:: ZM- |
| | | BBM2 5UTR::ZM-FIZZY-RELATED 2-like::PINII TERM + |
| | | UBI1ZM PRO::UBI1ZM 5UTR(PHI)::UBI1ZM |
| | | INTRON1(PHI)::Ds-RED2::PINII TERM + LB |
| 31 | RX000003 | RB + SB-ALS PRO::ZM-ALS (HRA) EXON1::ST-LS1 INTRON2 |
| | | FRAG1 + LOXP + ZM-AXIG1 1XOP-B PRO-V1::ZM-WUS2 |
| | | (CDNA)::IN2-1 TERM + AT-5-IV-2 INS + ATTB1 + ZM-PLTP |
| | | PRO::ZM-PLTP 5 UTR::ZM-ODP2 (ALT1)::OS-T28 TERM::PINII |
| | | TERM::CZ19B1 TERM + ALL STOPS2 + ZM-GLB1 PRO::MO- |
| | | CRE EXON1::ST-LS1 INTRON2-V2::MO-CRE EXON2::PINII |
| | | TERM-V3 + SB-UBI PRO::SB-UBI INTRON1::ZS-GREEN1::OS- |
| | | UBI TERM + MINI-ALLSTOPS + LOXP + ZM-ALS (HRA) |
| | | EXON2::SB-PEPC1 TERM (MOD1) + ZM-BBM2 PRO:: ZM- |
| | | BBM2 5UTR::ZM-FIZZY-RELATED 2-like B::PINII TERM + |
| | | UBI1ZM PRO::UBI1ZM 5UTR(PHI)::UBI1ZM |
| | | INTRON1(PHI)::Ds-RED2::PINII TERM + LB |
| 32 | RX000004 | RB + SB-ALS PRO::ZM-ALS (HRA) EXON1::ST-LS1 INTRON2 |
| | | FRAG1 + LOXP + ZM-AXIG1 1XOP-B PRO-V1::ZM-WUS2 |
| | | (CDNA)::IN2-1 TERM + AT-5-IV-2 INS + ATTB1 + ZM-PLTP |
| | | PRO::ZM-PLTP 5 UTR::ZM-ODP2 (ALT1)::OS-T28 TERM::PINII |
| | | TERM::CZ19B1 TERM + ALL STOPS2 + ZM-GLB1 PRO::MO- |
| | | CRE EXON1::ST-LS1 INTRON2-V2::MO-CRE EXON2::PINII |
| | | TERM-V3 + SB-UBI PRO::SB-UBI INTRON1::ZS-GREEN1::OS- |
| | | UBI TERM + MINI-ALLSTOPS + LOXP + ZM-ALS (HRA) |
| | | EXON2::SB-PEPC1 TERM (MOD1) + ZM-BBM2 PRO:: ZM- |
| | | BBM2 5UTR::ZM-FIZZY-RELATED 2-like C::PINII TERM + |
| | | UBI1ZM PRO::UBI1ZM 5UTR(PHI)::UBI1ZM |
| | | INTRON1(PHI)::Ds-RED2::PINII TERM + LB |
| 33 | RX000005 | RB + SB-ALS PRO::ZM-ALS (HRA) EXON1::ST-LS1 INTRON2 |
| | | FRAG1 + LOXP + ZM-AXIG1 1XOP-B PRO-V1::ZM-WUS2 |
| | | (CDNA)::IN2-1 TERM + AT-5-IV-2 INS + ATTB1 + ZM-PLTP |
| | | PRO::ZM-PLTP 5 UTR::ZM-ODP2 (ALT1)::OS-T28 TERM::PINII |
| | | TERM::CZ19B1 TERM + ALL STOPS2 + ZM-GLB1 PRO::MO- |
| | | CRE EXON1::ST-LS1 INTRON2-V2::MO-CRE EXON2::PINII |
| | | TERM-V3 + SB-UBI PRO::SB-UBI INTRON1::ZS-GREEN1::OS- |
| | | UBI TERM + MINI-ALLSTOPS + LOXP + ZM-ALS (HRA) |
| | | EXON2::SB-PEPC1 TERM (MOD1) + ZM-BBM2 PRO::ZM- |
| | | BBM2 5UTR::ZM-FIZZY-RELATED 2-like D::PINII TERM + |
| | | UBI1ZM PRO::UBI1ZM 5UTR(PHI)::UBI1ZM |
| | | INTRON1(PHI)::Ds-RED2::PINII TERM + LB |
| 34 | RX000006 | RB + SB-ALS PRO::ZM-ALS (HRA) EXON1::ST-LS1 INTRON2 |
| | | FRAG1 + LOXP + ZM-AXIG1 1XOP-B PRO-V1::ZM-WUS2 |
| | | (CDNA)::IN2-1 TERM + AT-5-IV-2 INS + ATTB1 + ZM-PLTP |
| | | PRO::ZM-PLTP 5 UTR::ZM-ODP2 (ALT1)::OS-T28 TERM::PINII |
| | | TERM::CZ19B1 TERM + ALL STOPS2 + ZM-GLB1 PRO::MO- |
| | | CRE EXON1::ST-LS1 INTRON2-V2::MO-CRE EXON2::PINII |
| | | TERM-V3 + SB-UBI PRO::SB-UBI INTRON1::ZS-GREEN1::OS- |
| | | UBI TERM + MINI-ALLSTOPS + LOXP + ZM-ALS (HRA) |
| | | EXON2::SB-PEPC1 TERM (MOD1) + ZM-BBM2 PRO::ZM- |
| | | BBM2 5UTR::tubulin-PS00227minus::PINII TERM + UBI1ZM |
| | | PRO::UBI1ZM 5UTR(PHI)::UBI1ZM INTRON1(PHI)::Ds- |
| | | RED2::PINII TERM + LB |
| 35 | RV042024 | RB + SB-ALS PRO::ZM-ALS (HRA) EXON1::ST-LS1 INTRON2 |
| | | FRAG1 + LOXP + ZM-AXIG1 1XOP-B PRO-V1::ZM-WUS2 |
| | | (CDNA)::IN2-1 TERM + AT-5-IV-2 INS + ATTB1 + ZM-PLTP |
| | | PRO::ZM-PLTP 5 UTR::ZM-ODP2 (ALT1)::OS-T28 TERM::PINII |
| | | TERM::CZ19B1 TERM + ALL STOPS2 + ZM-GLB1 PRO::MO- |
| | | CRE EXON1::ST-LS1 INTRON2-V2::MO-CRE EXON2::PINII |
| | | TERM-V3 + SB-UBI PRO::SB-UBI INTRON1::ZS-GREEN1::OS- |
| | | UBI TERM + MINI-ALLSTOPS + LOXP + ZM-ALS (HRA) |
| | | EXON2::SB-PEPC1 TERM (MOD1) + ZM-PRF2 PRO:: ZM-PRF2 |
| | | 5UTR:: ZM-CYCD2::PINII TERM + UBI1ZM PRO::UBI1ZM |
| | | 5UTR(PHI)::UBI1ZM INTRON1(PHI)::Ds-RED2::PINII TERM + LB |
| 36 | RX000007 | RB + SB-ALS PRO::ZM-ALS (HRA) EXON1::ST-LS1 INTRON2 |
| | | FRAG1 + LOXP + ZM-AXIG1 1XOP-B PRO-V1::ZM-WUS2 |
| | | (CDNA)::IN2-1 TERM + AT-5-IV-2 INS + ATTB1 + ZM-PLTP |
| | | PRO::ZM-PLTP 5 UTR::ZM-ODP2 (ALT1)::OS-T28 TERM::PINII |
| | | TERM::CZ19B1 TERM + ALL STOPS2 + ZM-GLB1 PRO::MO- |
| | | CRE EXON1::ST-LS1 INTRON2-V2::MO-CRE EXON2::PINII |
| | | TERM-V3 + SB-UBI PRO::SB-UBI INTRON1::ZS-GREEN1::OS- |
| | | UBI TERM + MINI-ALLSTOPS + LOXP + ZM-ALS (HRA) |
| | | EXON2::SB-PEPC1 TERM (MOD1) + ZM-PRF2 PRO:: ZM-PRF2 |
| | | 5UTR:: ZM-FIZZY-RELATED 2-like::PINII TERM + UBI1ZM |
| | | PRO::UBI1ZM 5UTR(PHI)::UBI1ZM INTRON1(PHI)::Ds- |
| | | RED2::PINII TERM + LB |
| 37 | RX000008 | RB + SB-ALS PRO::ZM-ALS (HRA) EXON1::ST-LS1 INTRON2 |
| | | FRAG1 + LOXP + ZM-AXIG1 1XOP-B PRO-V1::ZM-WUS2 |
| | | (CDNA)::IN2-1 TERM + AT-5-IV-2 INS + ATTB1 + ZM-PLTP |
| | | PRO::ZM-PLTP 5 UTR::ZM-ODP2 (ALT1)::OS-T28 TERM::PINII |
| | | TERM::CZ19B1 TERM + ALL STOPS2 + ZM-GLB1 PRO::MO- |
| | | CRE EXON1::ST-LS1 INTRON2-V2::MO-CRE EXON2::PINII |
| | | TERM-V3 + SB-UBI PRO::SB-UBI INTRON1::ZS-GREEN1::OS- |
| | | UBI TERM + MINI-ALLSTOPS + LOXP + ZM-ALS (HRA) |
| | | EXON2::SB-PEPC1 TERM (MOD1) + ZM-PRF2 PRO:: ZM-PRF2 |
| | | 5UTR:: ZM-FIZZY-RELATED 2-like B::PINII TERM + UBI1ZM |
| | | PRO::UBI1ZM 5UTR(PHI)::UBI1ZM INTRON1(PHI)::Ds- |
| | | RED2::PINII TERM + LB |
| 38 | RX000009 | RB + SB-ALS PRO::ZM-ALS (HRA) EXON1::ST-LS1 INTRON2 |
| | | FRAG1 + LOXP + ZM-AXIG1 1XOP-B PRO-V1::ZM-WUS2 |
| | | (CDNA)::IN2-1 TERM + AT-5-IV-2 INS + ATTB1 + ZM-PLTP |
| | | PRO::ZM-PLTP 5 UTR::ZM-ODP2 (ALT1)::OS-T28 TERM::PINII |
| | | TERM::CZ19B1 TERM + ALL STOPS2 + ZM-GLB1 PRO::MO- |
| | | CRE EXON1::ST-LS1 INTRON2-V2::MO-CRE EXON2::PINII |
| | | TERM-V3 + SB-UBI PRO::SB-UBI INTRON1::ZS-GREEN1::OS- |
| | | UBI TERM + MINI-ALLSTOPS + LOXP + ZM-ALS (HRA) |
| | | EXON2::SB-PEPC1 TERM (MOD1) + ZM-PRF2 PRO:: ZM-PRF2 |
| | | 5UTR:: ZM-FIZZY-RELATED 2-like C::PINII TERM + UBI1ZM |
| | | PRO::UBI1ZM 5UTR(PHI)::UBI1ZM INTRON1(PHI)::Ds- |
| | | RED2::PINII TERM + LB |
| 39 | RX000010 | RB + SB-ALS PRO::ZM-ALS (HRA) EXON1::ST-LS1 INTRON2 |
| | | FRAG1 + LOXP + ZM-AXIG1 1XOP-B PRO-V1::ZM-WUS2 |
| | | (CDNA)::IN2-1 TERM + AT-5-IV-2 INS + ATTB1 + ZM-PLTP |
| | | PRO::ZM-PLTP 5 UTR::ZM-ODP2 (ALT1)::OS-T28 TERM::PINII |
| | | TERM::CZ19B1 TERM + ALL STOPS2 + ZM-GLB 1 PRO::MO- |
| | | CRE EXON1::ST-LS1 INTRON2-V2::MO-CRE EXON2::PINII |
| | | TERM-V3 + SB-UBI PRO::SB-UBI INTRON1::ZS-GREEN1::OS- |
| | | UBI TERM + MINI-ALLSTOPS + LOXP + ZM-ALS (HRA) |
| | | EXON2::SB-PEPC1 TERM (MOD1) + ZM-PRF2 PRO::ZM-PRF2 |
| | | 5UTR:: ZM-FIZZY-RELATED 2-like D::PINII TERM + UBI1ZM |
| | | PRO::UBI1ZM 5UTR(PHI)::UBI1ZM INTRON1(PHI)::Ds- |
| | | RED2::PINII TERM + LB |
| 40 | RX000011 | RB + SB-ALS PRO::ZM-ALS (HRA) EXON1::ST-LS1 INTRON2 |
| | | FRAG1 + LOXP + ZM-AXIG1 1XOP-B PRO-V1::ZM-WUS2 |
| | | (CDNA)::IN2-1 TERM + AT-5-IV-2 INS + ATTB1 + ZM-PLTP |
| | | PRO::ZM-PLTP 5 UTR::ZM-ODP2 (ALT1)::OS-T28 TERM::PINII |
| | | TERM::CZ19B1 TERM + ALL STOPS2 + ZM-GLB1 PRO::MO- |
| | | CRE EXON1::ST-LS1 INTRON2-V2::MO-CRE EXON2::PINII |
| | | TERM-V3 + SB-UBI PRO::SB-UBI INTRON1::ZS-GREEN1::OS- |
| | | UBI TERM + MINI-ALLSTOPS + LOXP + ZM-ALS (HRA) |
| | | EXON2::SB-PEPC1 TERM (MOD1) + ZM-PRF2 PRO:: ZM-PRF2 |
| | | 5UTR::tubulin-PS00227minus::PINII TERM + UBI1ZM |
| | | PRO::UBI1ZM 5UTR(PHI)::UBI1ZM INTRON1 (PHI)::Ds- |
| | | RED2::PINII TERM + LB |
| 41 | RV042025 | RB + SB-ALS PRO::ZM-ALS (HRA) EXON1::ST-LS1 INTRON2 |
| | | FRAG1 + LOXP + ZM-AXIG1 1XOP-B PRO-V1::ZM-WUS2 |
| | | (CDNA)::IN2-1 TERM + AT-5-IV-2 INS + ATTB1 + ZM-PLTP |
| | | PRO::ZM-PLTP 5 UTR::ZM-ODP2 (ALT1)::OS-T28 TERM::PINII |
| | | TERM::CZ19B1 TERM + ALL STOPS2 + ZM-GLB1 PRO::MO- |
| | | CRE EXON1::ST-LS1 INTRON2-V2::MO-CRE EXON2::PINII |
| | | TERM-V3 + SB-UBI PRO::SB-UBI INTRON1::ZS-GREEN1::OS- |
| | | UBI TERM + MINI-ALLSTOPS + LOXP + ZM-ALS (HRA) |
| | | EXON2::SB-PEPC1 TERM (MOD1) + ZM-SF3 PRO::ZM-SF3 |
| | | 5UTR:: ZM-CYCD2::PINII TERM + UBI1ZM PRO::UBI1ZM |
| | | 5UTR(PHI)::UBI1ZM INTRON1(PHI)::Ds-RED2::PINII TERM + LB |
| 42 | RX000012 | RB + SB-ALS PRO::ZM-ALS (HRA) EXON1::ST-LS1 INTRON2 |
| | | FRAG1 + LOXP + ZM-AXIG1 1XOP-B PRO-V1::ZM-WUS2 |
| | | (CDNA)::IN2-1 TERM + AT-5-IV-2 INS + ATTB1 + ZM-PLTP |
| | | PRO::ZM-PLTP 5 UTR::ZM-ODP2 (ALT1)::OS-T28 TERM::PINII |
| | | TERM::CZ19B1 TERM + ALL STOPS2 + ZM-GLB1 PRO::MO- |
| | | CRE EXON1::ST-LS1 INTRON2-V2::MO-CRE EXON2::PINII |
| | | TERM-V3 + SB-UBI PRO::SB-UBI INTRON1::ZS-GREEN1::OS- |
| | | UBI TERM + MINI-ALLSTOPS + LOXP + ZM-ALS (HRA) |
| | | EXON2::SB-PEPC1 TERM (MOD1) + ZM-SF3 PRO:: ZM-SF3 |
| | | 5UTR:: ZM-FIZZY-RELATED 2-like::PINII TERM + UBI1ZM |
| | | PRO::UBI1ZM 5UTR(PHI)::UBI1ZM INTRON1(PHI)::Ds- |
| | | RED2::PINII TERM + LB |
| 43 | RX000013 | RB + SB-ALS PRO::ZM-ALS (HRA) EXON1::ST-LS1 INTRON2 |
| | | FRAG1 + LOXP + ZM-AXIG1 1XOP-B PRO-V1::ZM-WUS2 |
| | | (CDNA)::IN2-1 TERM + AT-5-IV-2 INS + ATTB1 + ZM-PLTP |
| | | PRO::ZM-PLTP 5 UTR::ZM-ODP2 (ALT1)::OS-T28 TERM::PINII |
| | | TERM::CZ19B1 TERM + ALL STOPS2 + ZM-GLB1 PRO::MO- |
| | | CRE EXON1::ST-LS1 INTRON2-V2::MO-CRE EXON2::PINII |
| | | TERM-V3 + SB-UBI PRO::SB-UBI INTRON1::ZS-GREEN1::OS- |
| | | UBI TERM + MINI-ALLSTOPS + LOXP + ZM-ALS (HRA) |
| | | EXON2::SB-PEPC1 TERM (MOD1) + ZM-SF3 PRO:: ZM-SF3 |
| | | 5UTR:: ZM-FIZZY-RELATED 2-like B::PINII TERM + UBI1ZM |
| | | PRO::UBI1ZM 5UTR(PHI)::UBI1ZM INTRON1(PHI)::Ds- |
| | | RED2::PINII TERM + LB |
| 44 | RX000014 | RB + SB-ALS PRO::ZM-ALS (HRA) EXON1::ST-LS1 INTRON2 |
| | | FRAG1 + LOXP + ZM-AXIG1 1XOP-B PRO-V1::ZM-WUS2 |
| | | (CDNA)::IN2-1 TERM + AT-5-IV-2 INS + ATTB1 + ZM-PLTP |
| | | PRO::ZM-PLTP 5 UTR::ZM-ODP2 (ALT1)::OS-T28 TERM::PINII |
| | | TERM::CZ19B1 TERM + ALL STOPS2 + ZM-GLB1 PRO::MO- |
| | | CRE EXON1::ST-LS1 INTRON2-V2::MO-CRE EXON2::PINII |
| | | TERM-V3 + SB-UBI PRO::SB-UBI INTRON1::ZS-GREEN1::OS- |
| | | UBI TERM + MINI-ALLSTOPS + LOXP + ZM-ALS (HRA) |
| | | EXON2::SB-PEPC1 TERM (MOD1) + ZM-SF3 PRO::ZM-SF3 |
| | | 5UTR:: ZM-FIZZY-RELATED 2-like C::PINII TERM + UBI1ZM |
| | | PRO::UBI1ZM 5UTR(PHI)::UBI1ZM INTRON1(PHI)::Ds- |
| | | RED2::PINII TERM + LB |
| 45 | RX000015 | RB + SB-ALS PRO::ZM-ALS (HRA) EXON1::ST-LS1 INTRON2 |
| | | FRAG1 + LOXP + ZM-AXIG1 1XOP-B PRO-V1::ZM-WUS2 |
| | | (CDNA)::IN2-1 TERM + AT-5-IV-2 INS + ATTB1 + ZM-PLTP |
| | | PRO::ZM-PLTP 5 UTR::ZM-ODP2 (ALT1)::OS-T28 TERM::PINII |
| | | TERM::CZ19B1 TERM + ALL STOPS2 + ZM-GLB1 PRO::MO- |
| | | CRE EXON1::ST-LS1 INTRON2-V2::MO-CRE EXON2::PINII |
| | | TERM-V3 + SB-UBI PRO::SB-UBI INTRON1::ZS-GREEN1::OS- |
| | | UBI TERM + MINI-ALLSTOPS + LOXP + ZM-ALS (HRA) |
| | | EXON2::SB-PEPC1 TERM (MOD1) + ZM-SF3 PRO:: ZM-SF3 |
| | | 5UTR:: ZM-FIZZY-RELATED 2-like D::PINII TERM + UBI1ZM |
| | | PRO::UBI1ZM 5UTR(PHI)::UBI1ZM INTRON1(PHI)::Ds- |
| | | RED2::PINII TERM + LB |
| 46 | RX000016 | RB + SB-ALS PRO::ZM-ALS (HRA) EXON1::ST-LS1 INTRON2 |
| | | FRAG1 + LOXP + ZM-AXIG1 1XOP-B PRO-V1::ZM-WUS2 |
| | | (CDNA)::IN2-1 TERM + AT-5-IV-2 INS + ATTB1 + ZM-PLTP |
| | | PRO::ZM-PLTP 5 UTR::ZM-ODP2 (ALT1)::OS-T28 TERM::PINII |
| | | TERM::CZ19B1 TERM + ALL STOPS2 + ZM-GLB1 PRO::MO- |
| | | CRE EXON1::ST-LS1 INTRON2-V2::MO-CRE EXON2::PINII |
| | | TERM-V3 + SB-UBI PRO::SB-UBI INTRON1::ZS-GREEN1::OS- |
| | | UBI TERM + MINI-ALLSTOPS + LOXP + ZM-ALS (HRA) |
| | | EXON2::SB-PEPC1 TERM (MOD1) + ZM-SF3 PRO:: ZM-SF3 |
| | | 5UTR:: tubulin-PS00227minus::PINII TERM + UBI1ZM |
| | | PRO::UBI1ZM 5UTR(PHI)::UBI1ZM INTRON1 (PHI)::Ds- |
| | | RED2::PINII TERM + LB |
| 47 | RV042026 | RB + SB-ALS PRO::ZM-ALS (HRA) EXON1::ST-LS1 INTRON2 |
| | | FRAG1 + LOXP + ZM-AXIG1 1XOP-B PRO-V1::ZM-WUS2 |
| | | (CDNA)::IN2-1 TERM + AT-5-IV-2 INS + ATTB1 + ZM-PLTP |
| | | PRO::ZM-PLTP 5 UTR::ZM-ODP2 (ALT1)::OS-T28 TERM::PINII |
| | | TERM::CZ19B1 TERM + ALL STOPS2 + ZM-GLB1 PRO::MO- |
| | | CRE EXON1::ST-LS1 INTRON2-V2::MO-CRE EXON2::PINII |
| | | TERM-V3 + SB-UBI PRO::SB-UBI INTRON1::ZS-GREEN1::OS- |
| | | UBI TERM + MINI-ALLSTOPS + LOXP + ZM-ALS (HRA) |
| | | EXON2::SB-PEPC1 TERM (MOD1) + ZM-PLAA PRO (TR1):: |
| | | ZM-PLAA 5UTR::ZM-CYCD2::PINII TERM + UBI1ZM |
| | | PRO::UBI1ZM 5UTR(PHI)::UBI1ZM INTRON1(PHI)::Ds- |
| | | RED2::PINII TERM + LB |
| 48 | RX000017 | RB + SB-ALS PRO::ZM-ALS (HRA) EXON1::ST-LS1 INTRON2 |
| | | FRAG1 + LOXP + ZM-AXIG1 1XOP-B PRO-V1::ZM-WUS2 |
| | | (CDNA)::IN2-1 TERM + AT-5-IV-2 INS + ATTB1 + ZM-PLTP |
| | | PRO::ZM-PLTP 5 UTR::ZM-ODP2 (ALT1)::OS-T28 TERM::PINII |
| | | TERM::CZ19B1 TERM + ALL STOPS2 + ZM-GLB1 PRO::MO- |
| | | CRE EXON1::ST-LS1 INTRON2-V2::MO-CRE EXON2::PINII |
| | | TERM-V3 + SB-UBI PRO::SB-UBI INTRON1::ZS-GREEN1::OS- |
| | | UBI TERM + MINI-ALLSTOPS + LOXP + ZM-ALS (HRA) |
| | | EXON2::SB-PEPC1 TERM (MOD1) + ZM-PLAA PRO (TR1):: |
| | | ZM-PLAA 5UTR:: ZM-FIZZY-RELATED 2-like::PINII TERM + |
| | | UBI1ZM PRO::UBI1ZM 5UTR(PHI)::UBI1ZM |
| | | INTRON1(PHI)::Ds-RED2::PINII TERM + LB |
| 49 | RX000018 | RB + SB-ALS PRO::ZM-ALS (HRA) EXON1::ST-LS1 INTRON2 |
| | | FRAG1 + LOXP + ZM-AXIG1 1XOP-B PRO-V1::ZM-WUS2 |
| | | (CDNA)::IN2-1 TERM + AT-5-IV-2 INS + ATTB1 + ZM-PLTP |
| | | PRO::ZM-PLTP 5 UTR::ZM-ODP2 (ALT1)::OS-T28 TERM::PINII |
| | | TERM::CZ19B1 TERM + ALL STOPS2 + ZM-GLB1 PRO::MO- |
| | | CRE EXON1::ST-LS1 INTRON2-V2::MO-CRE EXON2::PINII |
| | | TERM-V3 + SB-UBI PRO::SB-UBI INTRON1::ZS-GREEN1::OS- |
| | | UBI TERM + MINI-ALLSTOPS + LOXP + ZM-ALS (HRA) |
| | | EXON2::SB-PEPC1 TERM (MOD1) + ZM-PLAA PRO (TR1):: |
| | | ZM-PLAA 5UTR:: ZM-FIZZY-RELATED 2-like B::PINII TERM + |
| | | UBI1ZM PRO::UBI1ZM 5UTR(PHI)::UBI1ZM |
| | | INTRON1(PHI)::Ds-RED2::PINII TERM + LB |
| 50 | RX000019 | RB + SB-ALS PRO::ZM-ALS (HRA) EXON1::ST-LS1 INTRON2 |
| | | FRAG1 + LOXP + ZM-AXIG1 1XOP-B PRO-V1::ZM-WUS2 |
| | | (CDNA)::IN2-1 TERM + AT-5-IV-2 INS + ATTB1 + ZM-PLTP |
| | | PRO::ZM-PLTP 5 UTR::ZM-ODP2 (ALT1)::OS-T28 TERM::PINII |
| | | TERM::CZ19B1 TERM + ALL STOPS2 + ZM-GLB1 PRO::MO- |
| | | CRE EXON1::ST-LS1 INTRON2-V2::MO-CRE EXON2::PINII |
| | | TERM-V3 + SB-UBI PRO::SB-UBI INTRON1::ZS-GREEN1::OS- |
| | | UBI TERM + MINI-ALLSTOPS + LOXP + ZM-ALS (HRA) |
| | | EXON2::SB-PEPC1 TERM (MOD1) + ZM-PLAA PRO (TR1):: |
| | | ZM-PLAA 5UTR:: ZM-FIZZY-RELATED 2-like C::PINII TERM + |
| | | UBI1ZM PRO::UBI1ZM 5UTR(PHI)::UBI1ZM |
| | | INTRON1(PHI)::Ds-RED2::PINII TERM + LB |
| 51 | RX000020 | RB + SB-ALS PRO::ZM-ALS (HRA) EXON1::ST-LS1 INTRON2 |
| | | FRAG1 + LOXP + ZM-AXIG1 1XOP-B PRO-V1::ZM-WUS2 |
| | | (CDNA)::IN2-1 TERM + AT-5-IV-2 INS + ATTB1 + ZM-PLTP |
| | | PRO::ZM-PLTP 5 UTR::ZM-ODP2 (ALT1)::OS-T28 TERM::PINII |
| | | TERM::CZ19B1 TERM + ALL STOPS2 + ZM-GLB1 PRO::MO- |
| | | CRE EXON1::ST-LS1 INTRON2-V2::MO-CRE EXON2::PINII |
| | | TERM-V3 + SB-UBI PRO::SB-UBI INTRON1::ZS-GREEN1::OS- |
| | | UBI TERM + MINI-ALLSTOPS + LOXP + ZM-ALS (HRA) |
| | | EXON2::SB-PEPC1 TERM (MOD1) + ZM-PLAA PRO (TR1):: |
| | | ZM-PLAA 5UTR:: ZM-FIZZY-RELATED 2-like D::PINII TERM + |
| | | UBI1ZM PRO::UBI1ZM 5UTR(PHI)::UBI1ZM |
| | | INTRON1(PHI)::Ds-RED2::PINII TERM + LB |
| 52 | RX000021 | RB + SB-ALS PRO::ZM-ALS (HRA) EXON1::ST-LS1 INTRON2 |
| | | FRAG1 + LOXP + ZM-AXIG1 1XOP-B PRO-V1::ZM-WUS2 |
| | | (CDNA)::IN2-1 TERM + AT-5-IV-2 INS + ATTB1 + ZM-PLTP |
| | | PRO::ZM-PLTP 5 UTR::ZM-ODP2 (ALT1)::OS-T28 TERM::PINII |
| | | TERM::CZ19B1 TERM + ALL STOPS2 + ZM-GLB1 PRO::MO- |
| | | CRE EXON1::ST-LS1 INTRON2-V2::MO-CRE EXON2::PINII |
| | | TERM-V3 + SB-UBI PRO::SB-UBI INTRON1::ZS-GREEN1::OS- |
| | | UBI TERM + MINI-ALLSTOPS + LOXP + ZM-ALS (HRA) |
| | | EXON2::SB-PEPC1 TERM (MOD1) + ZM-PLAA PRO (TR1):: |
| | | ZM-PLAA 5UTR:: tubulin-PS00227minus::PINII TERM + UBI1ZM |
| | | PRO::UBI1ZM 5UTR(PHI)::UBI1ZM INTRON1 (PHI)::Ds- |
| | | RED2::PINII TERM + LB |
| 67 | RV044484 | RB + SB-ALS PRO::ZM-ALS (HRA) EXON1::ST-LS1 INTRON2 |
| | | FRAG1 + LOXP + ZM-AXIG1 1XOP-B PRO-V1::ZM-WUS2 |
| | | (CDNA)::IN2-1 TERM + AT-5-IV-2 INS + ATTB1 + ZM-PLTP |
| | | PRO::ZM-PLTP 5 UTR::ZM-ODP2 (ALT1)::OS-T28 TERM::PINII |
| | | TERM::CZ19B1 TERM + ALL STOPS2 + ZM-GLB1 PRO::MO- |
| | | CRE EXON1::ST-LS1 INTRON2-V2::MO-CRE EXON2::PINII |
| | | TERM-V3 + SB-UBI PRO::SB-UBI INTRON1::ZS-GREEN1::OS- |
| | | UBI TERM + MINI-ALLSTOPS + LOXP + ZM-ALS (HRA) |
| | | EXON2::SB-PEPC1 TERM (MOD1) + OS-BBM1 PRO(3KB)::ZM- |
| | | CYCD2::PINII TERM + UBI1ZM PRO::UBI1ZM |
| | | 5UTR(PHI)::UBI1ZM INTRON1(PHI)::Ds-RED2::PINII TERM + LB |

### Example 2: Culture Media

[0167] See Table 3 and Table 4 for a description of media formations for transformation, selection and regeneration useful in the methods of the present disclosure.

TABLE 3

| | Units | | | | |
|---|---|---|---|---|---|
| | per | | | | |
| Medium components | liter | 12R | 810K | 700A | 710I |
| MS BASAL SALT | g | | | 4.3 | 4.3 |
| MIXTURE | | | | | |
| N6 BASAL SALTS | g | | | | |
| N6 MACRONUTRIENTS | ml | | | | |
| 10X | | | | | |
| POTASSIUM NITRATE | g | | | | |
| B5H MINOR SALTS 1000X | ml | | | | |
| NaFe EDTA FOR B5H | ml | | | | |
| 100X | | | | | |
| ERIKSSON'S VITAMINS | ml | | | | |
| 1000X | | | | | |
| S&H VITAMIN STOCK | ml | | | | |
| 100X | | | | | |
| THIAMINE•HCL | mg | | | 10.0 | 10.0 |
| L-PROLINE | g | | | | 0.7 |
| CASEIN HYDROLYSATE | g | | | | |
| (ACID) | | | | | |
| SUCROSE | g | | | 68.5 | 20.0 |
| GLUCOSE | g | 5.0 | | 36.0 | 10.0 |
| 2,4-D | mg | | | 1.5 | 2.0 |
| AGAR | g | 15.0 | | | 8.0 |
| BACTO-AGAR | g | | 15.0 | | |
| DICAMBA | g | | | | |
| SILVER NITRATE | mg | | | | |
| AGRIBIO Carbenicillin | mg | | | | |
| Timentin | mg | | | | |
| Cefotaxime | mg | | | | |
| MYO-INOSITOL | g | | | 0.1 | 0.1 |
| NICOTINIC ACID | mg | | | 0.5 | 0.5 |
| PYRIDOXINE•HCL | mg | | | 0.5 | 0.5 |
| VITAMIN ASSAY | g | | | 1.0 | |
| CASAMINO ACIDS | | | | | |
| MES BUFFER | g | | | | 0.5 |
| ACETOSYRINGONE | uM | | | | 100.0 |
| ASCORBIC ACID | mg | | | | 10.0 |
| 10 MG/ML (7S) | | | | | |
| MS VITAMIN STOCK | ml | | | | |
| SOL. | | | | | |
| ZEATIN | mg | | | | |
| CUPRIC SULFATE | mg | | | | |
| IAA 0.5 MG/ML (28A) | ml | | | | |
| ABA 0.1 mm | ml | | | | |
| THIDIAZURON | mg | | | | |
| AGRIBIO Carbenicillin | mg | | | | |
| BAP | mg | | | | |
| YEAST EXTRACT (BD | g | | 5.0 | | |
| Difco) | | | | | |
| PEPTONE | g | | 10.0 | | |
| SODIUM CHLORIDE | g | | 5.0 | | |
| SPECTINOMYCIN | mg | 50.0 | 50.0 | | |
| FERROUS SULFATE•7H20 | ml | 2.0 | | | |
| AB BUFFER 20X (12D) | ml | 50.0 | | | |
| AB SALTS 20X (12E) | ml | 50.0 | | | |
| THYMIDINE | mg | 50.0 | 50.0 | 50.0 | |
| GENTAMYCIN | mg | 50.0 | 50.0 | | |
| MEROPENEM | mg | | | | |
| pH | | | 6.8 | 5.2 | 5.8 |

TABLE 4

| | Units | | | | |
|---|---|---|---|---|---|
| | per | | | | |
| Medium components | liter | 605J | 605B | 562V | 289Q |
| MS BASAL SALT | g | 4.3 | 4.3 | | 4.3 |
| MIXTURE | | | | | |
| N6 BASAL SALTS | g | | | 4.0 | |
| N6 MACRONUTRIENTS | ml | 60.0 | 60.0 | | |
| 10X | | | | | |
| POTASSIUM NITRATE | g | 1.7 | 1.7 | | |
| B5H MINOR SALTS 1000X | ml | 0.6 | 0.6 | | |
| NaFe EDTA FOR B5H | ml | 6.0 | 6.0 | | |
| 100X | | | | | |
| ERIKSSON'S VITAMINS | ml | 0.4 | 0.4 | 1.0 | |
| 1000X | | | | | |
| S&H VITAMIN STOCK | ml | 6.0 | 6.0 | | |
| 100X | | | | | |
| THIAMINE•HCL | mg | 0.5 | 0.5 | 0.5 | |
| L-PROLINE | g | 2.0 | 2.0 | 0.69 | 0.7 |
| CASEIN HYDROLYSATE | g | 0.3 | 0.3 | | |
| (ACID) | | | | | |
| SUCROSE | g | 20.0 | 20.0 | 30.0 | 60.0 |
| GLUCOSE | g | 0.6 | 0.6 | | |
| 2,4-D | mg | 0.8 | 0.8 | 2.0 | |
| AGAR | g | 6.0 | 6.0 | 8.0 | 8.0 |
| BACTO-AGAR | g | | | | |
| DICAMBA | g | 1.2 | 1.2 | | |
| SILVER NITRATE | mg | 3.4 | 3.4 | 0.85 | |
| AGRIBIO Carbenicillin | mg | 100.0 | | | |
| Timentin | mg | | | | 150.0 |
| Cefotaxime | mg | | | | 100.0 |
| MYO-INOSITOL | g | | | | 0.1 |
| NICOTINIC ACID | mg | | | | |
| PYRIDOXINE•HCL | mg | | | | |
| VITAMIN ASSAY | g | | | | |
| CASAMINO ACIDS | | | | | |
| MES BUFFER | g | | | | |
| ACETOSYRINGONE | uM | | | 100.0 | |
| ASCORBIC ACID | mg | | | | |
| 10 MG/ML (7S) | | | | | |
| MS VITAMIN STOCK | ml | | | | 5.0 |
| SOL. | | | | | |
| ZEATIN | mg | | | | 0.5 |
| CUPRIC SULFATE | mg | | | | 1.3 |
| IAA 0.5 MG/ML (28A) | ml | | | | 2.0 |
| ABA 0.1 mm | ml | | | | 1.0 |
| THIDIAZURON | mg | | | | 0.1 |
| AGRIBIO Carbenicillin | mg | | | | 100.0 |
| BAP | mg | | | | 1.0 |
| YEAST EXTRACT (BD | g | | | | |
| Difco) | | | | | |
| PEPTONE | g | | | | |
| SODIUM CHLORIDE | g | | | | |
| SPECTINOMYCIN | mg | | | | |
| FERROUS SULFATE•7H20 | ml | | | | |
| AB BUFFER 20X (12D) | ml | | | | |
| AB SALTS 20X (12E) | ml | | | | |
| THYMIDINE | mg | | | 50.0 | |
| GENTAMYCIN | mg | | | | |
| MEROPENEM | mg | | 10.0 | | |
| pH | | 5.8 | 5.8 | 5.8 | 5.6 |

### Example 3: Agrobacterium-Mediated Transformation of Corn

### A. Preparation of Agrobacterium Master Plate

[0168] Agrobacterium tumefaciens harboring a binary donor vector was streaked out from a −80° C. frozen aliquot onto solid 12R medium and cultured at 28° C. in the dark for 2-3 days to make a master plate.

### B. Growing Agrobacterium on Solid Medium

[0169] A single colony or multiple colonies of Agrobacterium were picked from the master plate and streaked onto a second plate containing 810K medium and incubated at 28° C. in the dark overnight. Agrobacterium infection medium (700A; 5 ml) and 100 mM 3′-5′-Dimethoxy-4′-hydroxyacetophenone (acetosyringone; 5 μL) were added to a 14-mL conical tube in a hood. About 3 full loops of Agrobacterium from the second plate were suspended in the tube and the tube was then vortexed to make an even suspension. The suspension (1 ml) was transferred to a spectrophotometer tube and the optical density (550 nm) of the suspension was adjusted to a reading of about 0.35-1.0. The Agrobacterium concentration was approximately 0.5 to 2.0×10⁹ cfu/mL. The final Agrobacterium suspension was aliquoted into 2 mL microcentrifuge tubes, each containing about 1 mL of the suspension. The suspensions were then used as soon as possible.

### C. Growing Agrobacterium on Liquid Medium

[0170] Alternatively, Agrobacterium is prepared for transformation by growing in liquid medium. One day before infection, a 125-ml flask is prepared with 30 ml of 557A medium (10.5 g/l potassium phosphate dibasic, 4.5 g/l potassium phosphate monobasic anhydrous, 1 g/l ammonium sulfate, 0.5 g/l sodium citrate dehydrate, 10 g/l sucrose, 1 mM magnesium sulfate) and 30 μL spectinomycin (50 mg/mL) and 30 μL acetosyringone (20 mg/mL). A half loopful of Agrobacterium from a second plate is suspended into the flasks and placed on an orbital shaker set at 200 rpm and incubated at 28° C. overnight. The Agrobacterium culture is centrifuged at 5000 rpm for 10 min. The supernatant is removed and the Agrobacterium infection medium (700A) with acetosyringone solution is added. The bacteria is resuspended by vortex and the optical density (550 nm) of the Agrobacterium suspension is adjusted to a reading of about 0.35 to 2.0.

### D. Maize Transformation

[0171] Ears of a maize (Zea mays L.) cultivar were surface-sterilized for 15-20 min in 20% (v/v) bleach (5.25% sodium hypochlorite) plus 1 drop of Tween 20 followed by 3 washes in sterile water. Immature embryos (IEs) were isolated from ears and were placed in 2 ml of the Agrobacterium infection medium (700A) with acetosyringone solution. The optimal size of the embryos varies based on the inbred, but for transformation with WUS2 and ZM-ODP2 a wide size range of immature embryo sizes was used. The Agrobacterium infection medium (810K) was drawn off and 1 ml of the Agrobacterium suspension was added to the embryos and the tube was vortexed for 5-10 sec. The microfuge tube was incubated for 5 min in the hood. The suspension of Agrobacterium and embryos were poured onto 7101 (or 562V) co-cultivation medium (see Table 3 and Table 4, respectively). Any embryos left in the tube were transferred to the plate using a sterile spatula. The Agrobacterium suspension was then drawn off and the embryos placed axis side down on the media. The plate was incubated in the dark at 21° C. for 1-3 days of co-cultivation and embryos were then transferred to resting medium (605B medium) without selection.

### Example 4: Production of a Doubled Haploid Inducer (DHI) Having Introduced Genetic Chromosome Doubling Factors

[0172] The present disclosure provides a maize maternal haploid induction system comprising maize lines containing a loss-of-function mutation at the MATRILINEAL (MATL) gene having a non-chemical, genetic mechanism to induce chromosome doubling of a one-celled haploid zygote. Disrupting the G1-S-G2-M (gap phase 1-synthesis phase-gap phase 2-mitosis) cell cycle to obtain a doubled haploid makes use of the transient zygotic state that precedes uniparental (male) chromosome elimination in maize maternal haploid induction. The present disclosure provides a method using haploid inducers comprising constructs integrated into the haploid inducer genome useful for disrupting the G1-S-G2-M cell cycle. These transformed haploid inducing lines are used as a parent in a cross between two plants. During pollination, expression of the genetic chromosome doubling factor from the paternal allele occurs before, during, or after fertilization (or a combination of the foregoing), providing chromosome doubling capabilities to an embryo sac cell (e.g., an egg cell). Such chromosome doubling activity in or near (or adjacent) the embryo sac cell, particularly the egg cell, stimulates embryogenesis of a cell containing paired maternal chromosomes. Any haploid inducer line capable of incorporating introduced genetic doubling factors is suitable for the methods described herein. Loss of function mtl1 allele is provided as an illustrative embodiment of an inducer line. In the case of maize, these inducer lines include those that are selected and/or derived from Stock 6, RWK, RWS, UH400, AX5707RS, and NP2222-matl.

[0173] Constructs described herein containing expression cassettes encoding genetic chromosome doubling factors are operably linked to a promoter that drives expression from the male genome, for example at the earliest stages post-fertilization. An exemplary promoter for this purpose is the proximal promoter of the Oryza sativa BABY BOOM 1 locus (BBM1; SEQ ID NO: 1), wherein zygotic expression of BBM1 is initially specific to the male allele. It is expected that promoter sequences of other BBM homologs are useful in the methods disclosed herein. For example, the promoter (SEQ ID NO: 9) and 5′ UTR (SEQ ID NO: 10) of the Zea mays BBM-2 locus may be useful in the methods of the present disclosure.

[0174] Alternatively, genetic chromosome doubling activity may be provided to the maternal haploid embryo by the male gamete prior to karyogamy. In this aspect, the genetic chromosome doubling activity is conferred by a protein expressed by the male gamete before, during, or after fertilization and before karyogamy. Regulatory elements comprising a promoter and 5′ UTR that are active in the male gamete are used in the methods of the present disclosure, including, but not limited to Zea mays regulatory elements from a profilin homolog2 locus (PRF2 PRO SEQ ID NO: 11 and 5′ UTR SEQ ID NO: 12), a pollen-specific protein SF3-like protein (SF3 PRO SEQ ID NO: 13 and 5′ UTR SEQ ID NO: 14), or a pectate lyase/amb allergen locus (PLAA PRO SEQ ID NO: 15 and 5′ UTR SEQ ID NO: 16).

[0175] Exemplary genetic chromosome doubling methods include, but are not limited to, proteins that allow endoreduplication of the maternal haploid genome, proteins that inhibit tubulin polymerization of the maternal haploid genome, and proteins that alter cell cycle regulation of the maternal haploid genome as described herein.

### A. Genetic Chromosome Doubling Using Endoreduplication

[0176] The method of the present disclosure allows obtaining a doubled maternal haploid by genetically disrupting the G1-S-G2-M cell cycle.

[0177] In an aspect, genetic chromosome doubling is achieved by allowing replication of the genome without cell division. An exemplary protein useful for stimulating genome duplication in the absence of completing the M-phase, characterized by completing cytokinesis and producing two daughter cells, is the mitotic inhibitor cell cycle switch 52 protein (CCS52). CCS52 blocks mitosis by degrading mitotic cyclins, leading to endocycles comprising G1-S-G2 phases. It is expected that the expression of the CCS52 protein is useful as a genetic chromosome doubling agent for controlling endoreduplication.

[0178] Such a CCS52 protein is a plant homologue of Anaphase-promoting complex activators (“APC”; also, called the “cyclosome”) that are involved in mitotic cyclin degradation, wherein the APC components comprise an E3 ubiquitin ligase that degrades targeted cell cycle proteins via the 26S proteasome. Overexpression of a WD-repeat-containing a yeast protein like CCS52 triggered mitotic cyclin degradation, cell division arrest, endoreduplication and cell enlargement in manner consistent with the methods of the present disclosure. Genetic chromosome doubling factors that are Zea mays homologs useful in the methods of the present disclosure are shown in Table 5.

TABLE 5

| | DNA SEQ | Protein SEQ |
|---|---|---|
| Endoreduplication factor | ID NO: | ID NO: |
| ZM-FIZZY-RELATED 2 | 18 | 24 |
| ZM-FIZZY-RELATED 2-like B | 19 | 25 |
| ZM-FIZZY-RELATED 2-like C | 20 | 26 |
| ZM-FIZZY-RELATED 2-like D | 21 | 27 |

[0179] In the methods of the present disclosure, it is expected that the maternal haploid embryo is provided genetic chromosome doubling activity from the male gamete of the double haploid inducer.

### B. Genetic Chromosome Doubling Using Tubulin Polymerization Destabilization

[0180] In a further aspect, a method for genetically disrupting the G1-S-G2-M cell cycle is provided in which tubulin polymerization is inhibited by expression of inhibitory proteins, thereby mimicking the anti-mitotic action of chemicals used as chromosome doubling agents.

[0181] Eukaryotic cells express several tubulin proteins, with α- and β-tubulin being the main components of microtubules. Microtubules for the mitotic spindle provides the framework for separating daughter chromatids during mitosis. Microtubules are comprised of 13 filaments and each filament is end-to-end heterodimers of α-β-tubulin that is laterally associated into a tube-like structure. Tubulin proteins are GTPases with an active site formed at the interface between subunits, using essential amino acid residues from both subunits. Moreover, GTPase activity only occurs when two or more subunits are associated, wherein the N-terminal domain of one subunit provides a nucleotide binding site and the C-terminal domain provides a “T7 loop” responsible for nucleotide hydrolysis.

[0182] Given that α-β-tubulin heterodimers join end-to-end, with distinct polarity (e.g. β-tubulin always present at the (+) end and α-tubulin at the (−) end), and GTP binding pockets between the two subunits, the methods of the present disclosure disrupt microtubule polymerization. For example, by expressing a mutated β-tubulin subunit, specifically in the N-terminal domain of the subunit providing nucleotide binding site, then nucleotide hydrolysis is prohibited. Thus, the mutated β-tubulin subunit acts as a “poisonous” subunit, or a dominant negative mutation, blocking polymerization on the (+) end of the polymer, thereby inhibiting filament polymerization. In yeast, expression of mutant α-tubulin TUB1-828: D252A/E255A (SEQ ID NO: 3, encoded by SEQ ID NO: 5) also inhibits spindle assembly, even when present only as a minor component of the total α-tubulin pool. Thus, expressing a mutated tubulin subunit causes dynamic instability of filaments causing an anti-mitotic mode of action useful as a genetic chromosome doubling agent.

[0183] In an aspect, missense mutations within a conserved site, such as the tubulin conserved site [SAG]-G-G-T-G-[SA]-G (Prosite accession number PS00227), wherein a polynucleotide is used encoding missense mutations, for example H-A-A-H-R-Q-A residues substituted into the PS00227 site, herein called “β-tubulin-PS00227minus” (polynucleotide SEQ ID NO: 22; encoding SEQ ID NO: 28) are expected to provide genetic chromosome doubling activity to the maternal haploid embryo from the male gamete of the double haploid inducer.

### C. Genetic Chromosome Doubling Using Altered Cell Cycle Regulation

[0184] In a further aspect, the genetic chromosome doubling agent is a cyclin gene capable of altering cell cycle regulation before, during, or after fertilization. Genetic chromosome doubling of a parthenogenic haploid embryo has been shown by providing to an egg cell the activity of a cyclin gene, dpzm07g031470.1.1, herein called ZM-CYCD2 (SEQ ID NO: 17) encoding a cyclin delta-2-like protein (SEQ ID NO: 23). The activity of this cyclin gene during female gametogenesis provided chromosome doubling activity of a haploid embryo in vivo, thereby creating a diploidized (2n) embryo having only maternal chromosomes.

[0185] It is expected that these genes will be useful in the methods of the present disclosure in providing genetic chromosome doubling activity to the maternal haploid embryo from the male gamete of the double haploid inducer.

### D. Method for Obtaining a Doubled Haploid Inducer

[0186] The methods disclosed herein use a plasmid having an expression cassette with a polynucleotide comprising genetic chromosome doubling factors as described above. Plasmids useful for the current method are described in Tables 2 and 6.

TABLE 6

| SEQ | | Genetic Chromosome Doubling Expression Cassette | | |
|---|---|---|---|---|
| ID | | Regulatory | Doubling | Doubling |
| NO: | Plasmid | Element | Factor | Mechanism |
| 29 | RV044054 | ZM-BBM2 | ZM-CYCD2 | cell cycle regulation |
| 30 | RX000002 | | ZM-FIZZY-RELATED 2-like | endoreduplication |
| 31 | RX000003 | | ZM-FIZZY-RELATED 2-like B | |
| 32 | RX000004 | | ZM-FIZZY-RELATED 2-like C | |
| 33 | RX000005 | | ZM-FIZZY-RELATED 2-like D | |
| 34 | RX000006 | | tubulin-PS00227minus | microtubule destabilization |
| 35 | RV042024 | ZM-PRF2 | ZM-CYCD2 | cell cycle regulation |
| 36 | RX000007 | | ZM-FIZZY-RELATED 2-like | endoreduplication |
| 37 | RX000008 | | ZM-FIZZY-RELATED 2-like B | |
| 38 | RX000009 | | ZM-FIZZY-RELATED 2-like C | |
| 39 | RX000010 | | ZM-FIZZY-RELATED 2-like D | |
| 40 | RX000011 | | tubulin-PS00227minus | microtubule destabilization |
| 41 | RV042025 | ZM-SF3 | ZM-CYCD2 | cell cycle regulation |
| 42 | RX000012 | | ZM-FIZZY-RELATED 2-like | endoreduplication |
| 43 | RX000013 | | ZM-FIZZY-RELATED 2-like B | |
| 44 | RX000014 | | ZM-FIZZY-RELATED 2-like C | |
| 45 | RX000015 | | ZM-FIZZY-RELATED 2-like D | |
| 46 | RX000016 | | tubulin-PS00227minus | microtubule destabilization |
| 47 | RV042026 | ZM-PLAA | ZM-CYCD2 | cell cycle regulation |
| 48 | RX000017 | | ZM-FIZZY-RELATED 2-like | endoreduplication |
| 49 | RX000018 | | ZM-FIZZY-RELATED 2-like B | |
| 50 | RX000019 | | ZM-FIZZY-RELATED 2-like C | |
| 51 | RX000020 | | ZM-FIZZY-RELATED 2-like D | |
| 52 | RX000021 | | tubulin-PS00227minus | microtubule destabilization |
| 67 | RV044484 | OS-BBM1 | ZM-CYCD2 | cell cycle regulation |

[0187] For these experiments, a maize plant selected and/or derived from Stock 6, RWK, RWS, UH400, AX5707RS, and NP2222-matl, or any of the several other haploid inducer lines is transformed. It is also expected that a maize plant containing a mutation at the MATRILINEAL (MATL) gene is used in the methods of the present disclosure. Preferentially, the selected maize plant has a paternal morphological marker gene as described in U.S. Pat. No. 8,859,846 B2, incorporated by reference herein in its entirety. Here, a haploid detection method is used comprising the detection of a paternal morphological marker. A paternal morphological marker may comprise a fluorescent reporter expression construct, such as a green, yellow, or red fluorescent reporter gene, that allows the fluorescence detection in the embryos at the early developmental stage and/or an allele of the anthocyanin genes, such as the R1-scm allele, expressing in embryos at the early developmental stage. Such marker genes allow identifying diploid and haploid embryos based on the presence or absence of the paternal marker gene products, respectively.

[0188] Transformed doubled haploid inducer plants were created using the methods described in Example 3, using plasmids RV044054 (SEQ ID NO: 29), RV042024 (SEQ ID NO: 35), RV042025 (SEQ ID NO: 41), RV042026 (SEQ ID NO: 47), and RV044484 (SEQ ID NO: 67), described in Tables 2 and 6. Regenerated T₀ plants are analyzed by qPCR to identify single copy, hemizygous plants containing each plasmid. Propagating such plants results in obtaining and using single copy, homozygous plants for haploid induction crosses. In addition, it is expected that the remaining plasmids listed in Table 6 will be useful in creating transformed doubled haploid inducer plants as described in Example 3 for use in the methods disclosed herein.

[0189] Any such doubled inducer plants, or progeny thereof, are grown and used as a pollen donor to fertilize a donor ear of a female plant comprising a haploid induction cross. The ears of the female parent plants are shoot-bagged before silk emergence to avoid any foreign pollen contamination. The silks of the ears on the plants of the female parent plants are pollinated with viable pollen grains collected from the anthers of the doubled haploid inducer.

[0190] In an aspect, at approximately 9-21 days after pollination, ideally at 18 days, the immature ears are harvested. The ears are surface sterilized in 30% Clorox bleach plus 0.5% detergent for 20 minutes and rinsed two times with sterile water. The haploid embryos are isolated based on the identification of the visible marker gene in the inducer lines. For example, use of an inducer containing a fluorescent reporter gene or an anthocyanin biosynthesis gene operably linked to a promoter allowing gene expression in the embryos at the early developmental stage.

[0191] Alternatively, mature ears are harvested, seed is collected, and seed containing haploid or diploid embryos are identified based on the absence and presence of a paternal morphological marker gene, respectively.

[0192] It is expected the methods of the present disclosure using a doubled haploid inducer will eliminate the need to perform a chromosome doubling treatment. It is also expected that both the quantity and quality of the plants per DH (doubled haploid) breeding population will be improved. It is also expected that the doubled haploid inducer method described herein will improve both human safety and environmental health concerns in comparison to current methods that use certain chemical chromosome doubling treatments.

### Example 5. Development, Maintenance and Utility of a Doubled Haploid Inducer (DTII) System

[0193] The method of the current example described the maintenance and use of a doubled haploid inducer. Genetic chromosome doubling methods are described in Example 4 and related concepts are further described here as a method comprising a doubled haploid inducer system.

[0194] In one aspect, the current method describes transformation plasmids with an inactive genetic chromosome doubling trait during plant transformation, regeneration, and sporophytic growth that becomes active in the male gamete. In this manner, it is expected that the doubled haploid inducer is propagated and maintained as a diploid plant in most cells, except for a male gamete cell. In this manner the male gamete confers subsequent chromosome doubling activity to a maternal egg cell. Thus, in a second aspect, the example described a method for obtaining a maternal haploid plant that has been diploidized in vivo, also known as a “maternal di-haploid” plant, here obtained without use of a chemical chromosome doubling agent.

[0195] Here the method for obtaining a stably transformed plant is described (see FIG. 2). Briefly, immature diploid embryos of a haploid inducer lacking a fluorescent protein marker are transformed using Agrobacterium strain LBA4404 THY- (See U.S. Pat. No. 8,334,429 incorporated herein by reference in its entirety). Transformation is performed using a mixture of Agrobacteria, as described in US Patent Application Publication Number 2021/0062203 incorporated herein by reference in its entirety. An Agrobacterium strain having plasmid RV020636 (SEQ ID NO: 56) is used to obtain transgenic plants with a single-copy of an integrated T-DNA from a “doubled haploid inducer” (DHI) plasmid.

[0196] An exemplary DHI plasmid (SEQ ID NO: 55; see FIG. 1) described herein contains a polynucleotide with a first expression cassette comprising the ZM-CYCD2 (SEQ ID NO: 17) with chromosome doubling activity that is operably linked to the Zea mays BBM2 promoter and 5′ UTR (SEQ ID NO: 9-10, respectively). The first expression cassette contains a second, intervening expression cassette flanked by loxP sites. This second, intervening expression cassette encodes a Cre recombinase protein operably linked to the promoter and terminator of the Zea mays MATRILINEAL (MATL) gene (SEQ ID NO: 53 and SEQ ID NO: 54, respectively). It is expected that expression of Cre will occur during microgametogenesis and will excise the second, intervening expression cassette, thereby allowing expression of the genetic chromosome doubling factor upon delivery of the paternal chromatin to the egg cell. A doubled haploid inducer plasmid using any of the genetic chromosome doubling factors described in Example 4, either in substitution of ZM-CYCD2 or in any other combination are useful in the methods disclosed herein. The DHI plasmid also contains expression cassettes encoding a reporter marker gene, such as a red fluorescent protein, and a selectable marker gene. In this experiment, a mixture comprising 90% of the Agrobacterium strain having the DHI plasmid and 10% of the plasmid RV020636 (v/v) (SEQ ID NO: 56) is used for transformation.

[0197] Following co-infection of a diploid embryo, somatic embryogenesis is activated in response to RV020636 (SEQ ID NO: 56) activity and somatic embryos are cultured as described in Example 3. After approximately 6-10 days any proliferating tissue and somatic embryos are dissected and sub-cultured, wherein each portion of dissected tissue is transferred to maturation medium (289Q) for in vitro culture at 26-28° C. under dark conditions. After approximately 6-10 days the sub-cultured tissues are transferred to a light culture room at 26° C. until healthy plantlets with good roots develop. Approximately 7-14 days later, plantlets are transferred to flats containing potting soil and grown for 1 week in a growth chamber, subsequently grown an additional 1-2 weeks in the greenhouse, and then transplanted to soil in pots and grown under greenhouse conditions.

[0198] To identify T₀ plants having a stably integrated T-DNA provided by the DHI plasmid and lacking the T-DNA of plasmid RV020636 (SEQ ID NO: 56), leaf tissue is sampled per plant and is evaluated using PCR diagnostic methods. Plants lacking the RV020636 plasmid sequence (SEQ ID NO: 56) that are diploid and single copy for the DHI plasmid are selected, wherein each plant comprises a unique event. Selected T₀ plants are grown to maturity.

[0199] The ears of the selected T₀ plants are shoot-bagged before silk emergence to avoid any foreign pollen contamination. The silks of the ears on the plants of the female parent plants are pollinated with viable pollen grains collected from a doubled haploid inducer. Preferentially, the haploid inducer possesses a unique morphological trait, such as a transgene encoding a fluorescent protein reporter gene that differs from the reporter gene provided by the DHI plasmid, for example a transgene encoding a ZsYellow fluorescent protein reporter.

[0200] At approximately 9-14 days after pollination, the immature ears are harvested. The ears are surface sterilized in 30% bleach plus 0.5% Micro detergent for 20 minutes and rinsed two times with sterile water. T₁ embryos are dissected and cultured as described in EXAMPLE 3 and, here with the inclusion of a chromosome doubling step, such as contacting a plant cell with colchicine at a concentration of 0.1 to 1.0 g/ml for a period of 24 hours before transfer to a resting medium (605J) that is lacking a chromosome doubling treatment. Alternatively, the chromosome doubling step is performed at a later time, such as using root soaking methods.

[0201] After 24 hours, T₁ embryos are scored the absence/presence of the paternal morphological trait, such as expression of a ZsYellow fluorescent protein, wherein haploids and diploid embryos are detected based on the absence or presence of said trait, respectively. In the methods disclosed herein, it is expected that haploid induction cross will create a proportion of maternal haploid embryos with half expected to be non-transgenic and half expected to have inherited the DHI construct. Identification of the transgenic haploid embryos will be characterized by the absence of the paternal morphological trait and the presence of the DsRED trait (see FIGS. 1 and 2). Non-transgenic haploid embryos will lack both the paternal morphological trait and the presence of the DsRED trait and are discarded.

[0202] T₁ plants having the stably integrated T-DNA provided by the DHI plasmid and lacking in the T-DNA of plasmid RV020636 (SEQ ID NO: 56) that have been diploidized are potted to soil and grown to maturity. Such plants are expected to be homozygous for the DHI trait and 100% of the pollen grains are expected to have the DHI construct that becomes active during microgametogenesis (see FIG. 1). Briefly, the Cre recombinase expression cassette that that is operably linked to the MATL promoter will express in the pollen grain, thereby allows the expression of the doubling factor to be operably linked to the ZM-BBM2 promoter. Other expression cassettes encoding other genetic chromosome doubling factors are useful in the methods disclosed herein, for example as described in Example 4, as well as operably linking said expression cassettes to other useful promoters, for example as described in Example 4.

[0203] It is expected that maintaining a selected T₁ plant is performed by self-fertilization and results in producing the following outcomes: a haploid embryo (paternal genome elimination without doubling of maternal chromosome), a diploid embryo (paternal genome elimination and doubling of maternal chromosome; the desired outcome to obtain a DHI plant), or a triploid embryo (inherited paternal genome (1n) and a doubled maternal genome (2n)) (see FIG. 2). It is expected that a diploid T1 plant having 2 copies of the DHI construct is confirmed using copy number analysis methods that identify and select such a plant, or progeny thereof, as doubled haploid inducers, as shown in FIG. 3.

[0204] In the current method, utility of a DHI line is shown in FIG. 3, wherein pollen from a DHI plant is collected and used to fertilize a donor ear, for example the ear of a F1 hybrid resulting from a biparental cross that is obtained and processed using methods described above. It is expected the DHI construct will become active as described above (see FIG. 1), thereby producing an embryo either with or without the paternal genome. Embryos with the paternal genome are expected to be detected using the paternal morphological marker gene, for example DsRED activity and such diploid embryos are discarded. Embryos lacking the paternal genome are detected based on the absence of the paternal morphological marker gene, for example an embryo that does not express a DsRED protein. Such maternal embryos that are lacking the paternal marker are selected and transferred to a growth medium to obtain a plantlet.

[0205] It is expected that a diploidized maternal embryo is obtained in response to the genetic chromosome doubling activity provided by the paternal genome during or after fertilization using the methods disclosed herein. It is expected that such activity provided to a haploid maternal egg cell creates doubled haploid embryos in vivo. It is expected that such embryos do not require tissue culturing methods using a chemical doubling agent (see FIG. 3).

### Example 6: Automated Methods to Identify In Vivo Diploidized Maternal Embryos

[0206] As described in Example 5, while it is an expected goal and purpose of the methods disclosed herein to obtain in vivo doubled haploid embryos, the result of Example 5 may produce a population of maternal embryos as a combination of in vivo doubled haploid embryos and maternal haploids. Thus, a method to discern haploids and diploids is useful in the methods of the present disclosure. This example describes methods for this purpose.

[0207] For example, a population of maternal embryos is analyzed using an apparatus for preparing a plant tissue, to hold a tissue, for transferring plant tissue, for culturing plant tissue, and/or for subjecting the tissue to a force to divide the tissue into separate segments. It is expected such steps use more than one apparatus.

[0208] It is expected that the above automation steps also comprise integrating analytical capabilities including, but not limited to, use of different sensors and image capture systems. For example, an apparatus is used for acquiring an image, such as visual, hyperspectral, thermal, or fluorescence imaging apparatus. In another aspect, an apparatus is used for measuring, capturing, and analyzing qualitative and quantitative traits, such as biomass, shape, thickness, volume, growth rate, and/or morphological characteristics. In an aspect, the apparatus is also used for measuring and analyzing other parameters, such as light intensity, light duration, water and nutrient uptake, evaporation and transpiration, and/or quantitative measurement of the complete set of ions or changes in ion production under varied external stimuli.

[0209] In another aspect, a method comprising the analysis of a sampled tissue that is collected using at least one apparatus is integrated with methods for performing a ploidy analysis, for example methods using a flow cytometry. Such methods include, but are not limited to, collecting tissue, isolating intact nuclei, adding various buffer, reagents, and dyes to isolated nuclei, and automated transfer and loading of the sample into a flow cytometer.

[0210] The acquired images and data are for data analysis and interpretation; no effort is made here to describe all methods of acquisitions pertinent to the current example. Such methods include performing feature extraction for classification purposes, wherein such classification is used for predictive model generation. Such predictive modelling is a computer implemented model encompassing a variety of statistical techniques from data mining, automated feature extraction, and machine learning.

[0211] It is also expected that such data analysis comprises linking genotypic data with captured phenotypic data, including methods measuring biomolecules from a tissue before, during, or after such automation methods are performed.

[0212] It is expected that the results of the automated methods described herein are linked with genotypic data, for example to enable predicting phenotypic performance using a biological model based on genomic data of a characterized plant, tissue, or plant cell that was generated and/or treated using the methods disclosed herein.

[0213] It is expected that the methods disclosed herein improve the capability for identifying and selecting diploidized maternal embryos from haploid maternal embryos, including, but not limited to, aspects for improving the regeneration frequency, improved transplanting success, and ultimately improvements for the reproductive success of the diploidized plants produced using such automated treatment, handling, and phenotyping methods. It is expected that productivity gains are achieved when populations are enriched for diploidized maternal embryos that result in fertile plants.

[0214] In another aspect, it is expected that the results of linking genotypic data with the acquired phenotypic data will enable improving predicting phenotypic performance using a biological model based on genomic data of a characterized plant, tissue, or plant cell treated.

[0215] It is furthermore expected that the methods disclosed herein improve plant breeding outcomes, for example when such automated treatment, handling, and phenotyping methods that co-integrate the above data analysis and interpretation with methods of selecting such doubled haploid plants based on a genomic estimated breeding value are used.

[0216] It is expected these methods provide an improved productivity of a non-random, structured breeding population resulting in cost-effectively providing a population with the number of individuals required having some specified quantity and/or quality of interest. Thus, in comparison to having the same probability in the idealized population, such as the effective population size required when provided a random population, the methods disclosed herein improve the relative rate of genetic gain while using relatively fewer resources.

### Example 7: Alternative Maintenance Methods of a Doubled Haploid Inducer (DHI)

[0217] Doubled haploid inducers (DHI) as described in Examples 4 need a means of preventing the doubling process from occurring during seed increases (self-pollination) of the DHI. Moreover, most transformation processes involve an embryogenesis step, which may activate constructs as described in Example 4 when driven by the BABY BOOM 1 promoter. Such maintainer constructs generally have 3 components: (i) prevention of transmission through the pollen, (ii) a seed color marker gene to identify seeds which contain the maintainer construct, and (iii) a counteracting factor which negates the effect or phenotype of a trait, either present on another construct or in the natural plant genome.

[0218] An exemplary general maintainer construct for maintaining the DHI line is shown in FIG. 5. The maintainer construct is designed to allow seed production of the doubled haploid inducer (DHI) line without an increase in ploidy caused by the genetic chromosome doubling factor containing plant transcription unit (PTU). In this example, the maintainer construct includes three components: a seed color PTU to identify the maintainer construct-containing seeds resulting from the self-pollination; a pollen non-functional PTU to prevent transmission of the maintainer construct through the pollen (FIG. 5A); and an inhibitor of the genetic chromosome doubling factor PTU to keep the DHI in the diploid state. All functional pollen will contain only the genetic chromosome doubling factor PTU (FIG. 5B) and will induce doubled haploids (DH) in the induction cross. The maintainer construct will transmit through female gametes and will be present in the heterozygous state in ˜50% of DHI self-pollinated seeds (FIG. 5C). Such seeds are used for further seed increases and/or DH induction.

[0219] An example of the first component is a maize alpha-amylase gene in which the native signal peptide was replaced by the amyloplast-targeting signal peptide from the maize brittle-1 gene driven by the late pollen-specific promoter from a maize polygalacturonase gene, PG47 (SEQ ID NO: 6; see Wu et al. 2016. Plant Biotechnology Journal 14:1046-1054). An example of the second component is a polynucleotide encoding a DsRed2 protein coding sequence (SEQ ID NO: 8) driven by a promoter from a barley lipid transfer protein (LTP2) gene, which is preferentially expressed in the endosperm (SEQ ID NO: 7; see Wu et al. 2016. Plant Biotechnology Journal 14:1046-1054). The third component is designed to inhibit the transcription, translation, and/or activity of the genetic mechanisms that induce chromosome doubling described in Example 4.

[0220] Artificial microRNA (amiRNA)-mediated gene silencing represents one of such techniques. amiRNA technology exploits the microRNA (miRNA) biogenesis pathway to produce artificially designed small RNAs using the miRNA gene backbone. It generates a single type of small RNA population all with the same selective nucleic acid sequence, usually 21 nucleotides (nt) in length, providing a feasible method for either silencing an individual gene or simultaneously silencing closely related gene isoforms. Codon usage differences are used to specifically target the genetic mechanism present in the construct without affecting the expression of the endogenous form of said genetic mechanism.

[0221] Transcriptional repressors are proteins that bind to specific sites on DNA and prevent transcription of nearby genes, and represent another technique to inhibit the transcription, translation or activity of the genetic mechanisms that induce chromosome doubling. The promoter driving the genetic mechanism for chromosome doubling are modified to contain repressor binding sites. The repressor protein will not be present in the active pollen of a plant containing the maintainer construct, allowing the genetic mechanism of chromosome doubling to activate in the zygote following fertilization.

[0222] An exemplary method for inhibiting chromosome doubling activity is the use of repressor proteins. In the absence of the cognate ligand, a transcriptional repressor protein acts by binding to specific DNA sequences in operator regions, or “operators”. For example, transcriptional repressors belonging to the tetracycline repressor (TetR) family of bacterial regulatory proteins are one such class of transcriptional repressors of interest to the current method. In Escherichia coli, in the absence of tetracycline, TetR binds to the tetracycline operator (tetO) sequence and such binding affinity to TetR/operator sequences represses operon gene expression. In the presence of tetracycline, the conformation of a TetR-tetracycline complexes is changed, TetR/operator binding affinity is reduced, the TetR complex dissociates from the tetracycline operator, and gene expression of the operon is activated.

[0223] Here, a method for conditional transcriptional repression is described using the TetR/operator system to inhibit the transcription, translation or activity of the genetic mechanisms that induce chromosome doubling.

[0224] In one embodiment, the method of this Example 7 a plant with a stably incorporated chromosome doubling expression cassette containing a polynucleotide encoding a genetic chromosome doubling factor that is operably linked to an embryogenic promoter, such as the O. sativa BABY BOOM 1 promoter (SEQ ID NO: 1) having at least one tetracycline operator sequence, here called “TET OP1 (PHI)” (SEQ ID NO: 57) is disclosed. Genetic doubling factors include, but are not limited to, the fizzy related sequences described in Table 5; mutated tubulin coding sequences, such as mutant α-tubulin TUB1-828: D252A/E255A (SEQ ID NO: 3, encoded by SEQ ID NO: 5) or tubulin-PS00227minus (SEQ ID NO: 22); and a cyclin gene, such as ZM-CYCD2 (SEQ ID NO: 17).

[0225] To repress the above chromosome doubling expression cassette, an exemplary method of the current example also comprises the stably transformed plant having a conditional TetR expression cassette containing a polynucleotide encoding a tetracycline repressor that is operably linked to the Cauliflower mosaic virus 35S promoter (SEQ ID NO: 58). For example, a tetracycline repressor used here is a Zea mays codon optimized synthetic tetracycline repressor protein (polynucleotide SEQ ID NO: 59, encoding SEQ ID NO: 60). In this example, the repressor protein will not be present in the active pollen of a plant containing the maintainer construct yet will be expressed in other cell types. For this reason, the Cauliflower mosaic virus 35S promoter is a useful regulatory element given its activity in sporophytic cells and lack of activity in maize pollen (see Table 3 of Koziel, et al. 1993. Nat Biotechnol 11:194-200; https://doi.org/10.1038/nbt0293-194). Thus, it is expected the TetR protein will be active during the sporophytic growth, during megagametogenesis, yet not during microgamatogenesis.

[0226] It is expected that the combination of these two expression cassettes (a chromosome doubling expression cassette and a conditional TetR expression cassette) comprise a method for providing a counteracting factor which negates the effect or phenotype of the chromosome doubling trait allowing the genetic mechanism of chromosome doubling to activate in the zygote following fertilization.

[0227] In this manner, it is expected that a maintainer construct comprising (i) prevention of transmission through the pollen, (ii) a seed color marker gene to identify seeds which contain the maintainer construct, and (iii) a counteracting factor which negates the effect or phenotype of a trait are integrated components for methods to maintain a doubled haploid inducer.

### Example 8: Genetic Chromosome Doubling Using Alternative Cyclin Genes

[0228] Methods for in vivo genetic chromosome doubling using a transformed haploid inducer line are useful in the methods of the present disclosure. The method of Example 4 describes in vivo genetic chromosome doubling methods, for example altering cell cycle regulation of a female gamete, such as egg cell. Of particular interest is the method described in Example 4 C., wherein a cyclin gene confers genetic chromosome doubling activity of a haploid embryo in vivo. Additional cell cycle regulation genes are of interest for use in the methods of the present disclosure.

[0229] This Example 8 describes methods using alternative cyclin genes for the genetic chromosome doubling trait in combination with the haploid induction provided by the paternal genome of a haploid inducer line, such as Stock 6 or any derivative thereof.

[0230] The methods of the present disclosure simplify doubled haploid production logistics, reduce the cost of materials, reduce the demand for labor, improve safety by reducing lab usage of chemical doubling agents, and mitigate the negative impacts of attrition that occur despite obtaining a sample of embryos from a donor ear derived from a haploid induction cross.

[0231] Genetic chromosome doubling is performed using a cyclin protein family member as an alternative to the Dz470 protein. Preferentially, the cyclin protein family member is a cyclin capable of linking growth and cell cycle control, such as a D-type cyclin. For example, D-type cyclins that have homology to Dz470, a cyclin delta-2 protein.

[0232] Using methods described in Example 4, it is expected that plasmids are created and used for transformation into a plant as described in Example 3, using a DNA polynucleotide encoding a cyclin family member shown in Table 7.

TABLE 7

| | | | | DNA | PRT |
|---|---|---|---|---|---|
| | | | Hit | SEQ | SEQ |
| Homolog ID | Organism | Relation | Description | ID NO: | ID NO: |
| At2g22490.1 | Arabidopsis | ortholog | CYCD2; 1 | 68 | 86 |
| | thaliana | | | | |
| At5g65420.1 | Arabidopsis | family | CYCD4; 1 | 69 | 87 |
| | thaliana | | | | |
| At5g10440.1 | Arabidopsis | family | CYCD4; 2 | 70 | 88 |
| | thaliana | | | | |
| Glyma14g35850.1 | Glycine | ortholog | D-type cyclin | 71 | 89 |
| | max | | | | |
| Glyma02g37560.1 | Glycine | family | Cyclin | 72 | 90 |
| | max | | | | |
| Glyma01g03030.1 | Glycine | family | Cyclin | 73 | 91 |
| | max | | | | |
| Glyma18g21730.1 | Glycine | family | Cyclin | 74 | 92 |
| | max | | | | |
| Os09g29100.1 | Oryza | candidate | cDNA putative, | 75 | 93 |
| | sativa | | expressed | | |
| Os08g37390.1 | Oryza | family | cDNA putative, | 76 | 94 |
| | sativa | | expressed | | |
| Os07g42860.1 | Oryza | family | cDNA putative, | 77 | 95 |
| | sativa | | expressed | | |
| Sb02g027020.1 | Sorghum | ortholog | D-type cyclin | 78 | 96 |
| | bicolor | | | | |
| Sb07g023350.1 | Sorghum | family | D-type cyclin | 79 | 97 |
| | bicolor | | | | |
| Sb02g039550.1 | Sorghum | family | D-type cyclin | 80 | 98 |
| | bicolor | | | | |
| dpzm04g027750.1.1 | Zea mays | family | Cyclin delta-2 | 81 | 99 |
| dpzm04g051480.1.1 | Zea mays | family | Cyclin, C- | 82 | 100 |
| | | | terminal domain | | |
| | | | protein | | |
| dpzm05g068750.1.1 | Zea mays | family | Cyclin, C- | 83 | 101 |
| | | | terminal domain | | |
| | | | protein | | |
| dpzm01g064180.1.1 | Zea mays | family | D-type cyclin | 84 | 102 |
| dpzm02g059300.1.1 | Zea mays | family | Cyclin | 85 | 103 |

[0233] It is expected that providing the simultaneous activity of the haploid induction characteristic of a haploid inducer line combined with the genetic chromosome doubling activity provided by an alternative cyclin gene family member is used to obtain in vivo diploidized maternal embryos.

[0234] The benefits of providing the simultaneous activity of the haploid induction characteristic of a haploid inducer line combined with the genetic chromosome doubling activity are numerous. These benefits include, but are not limited to, the elimination of 1) performing haploid induction crosses that require planting both a donor plant and a haploid inducer plant, 2) monitoring embryo development after performing the haploid induction cross, 3) harvesting the donor ear of said haploid induction cross in a timely manner based on embryo development, 4) isolating embryos from said donor ear (often a labor-intensive and tedious process), 5) contacting isolated embryos with a chemical chromosome doubling agent (a process that poses safety and health concerns of exposure to mammalian cells), 6) removing treated embryos from contact with said chemical chromosome doubling agent, 7) identifying and sorting haploid from diploid embryos, 8) transferring selected haploid embryos for continued in vitro tissue culture propagation, 9) regenerating a plantlet from said tissue culture steps, 10) hardening the plantlet, 11) transplanting said hardened plantlet, and 12) the negative impacts that occur at each step that result in impaired development, and more importantly impaired fertility, of said doubled haploid plant. The methods disclosed herein positively impact logistics resulting in cost savings and provide productivity gains for breeding programs using doubled haploid technologies through reduced attrition of haploid embryos throughout the process.

### Example 9: Genetic Chromosome Doubling Using Wide Hybridization

[0235] Wide hybridization comprises the exchange or modification of the genes due to crossing between species from distant gene pools. Crossing between individuals of different species or genera, herein called interspecific and intergeneric hybrids, respectively, provides a way to combine diverged genomes into one nucleus. Wide hybridization crosses useful in the methods disclosed herein include, but are not limited, to methods for obtaining interspecific or intergeneric hybrids.

[0236] Progeny of wide hybridization crosses wherein one parent of the wide hybridization cross is transformed with a construct containing a heterologous construct encoding a genetic chromosome doubling factor are useful in the methods disclosed herein. The parent having a genetic chromosome doubling trait is used as a pollen donor with the pollen being used to fertilize the maternal gametophyte of the second parent. It is expected that the genetic chromosome doubling activity of the first parent is provided to the maternal gametophyte of the second parent. It is expected that the maternal gametophyte of the second parent will be a haploid (1n) cell that becomes an in vivo diploidized (2n) cell comprising two sets of maternal chromosomes. Such an in vivo diploidized (2n) cell is used to obtain an embryo that is used to obtain a doubled haploid plant. The progeny obtained by self-fertilization of such a doubled haploid plant are used in plant breeding.

[0237] It is expected that the genome of the first parent having a genetic chromosome doubling trait will be eliminated from the maternal cell, for example, by genome elimination before, during or after fertilization. Wide crosses using cultivated maize (Zea mays) as the second parent will provide a maternal gametophtye that is fertilized with pollen obtained from a first parent. Pollen is obtained from any plant that is not normally sexually compatible Z. mays including, but not limited to, pollen obtained from the Poaceae Family, preferentially from a Glade including Panicoideae, Arundinoideae, Chloridoideae, Micrairoideae, Aristidoideae, and Danthonioideae subfamilies, and more preferentially, from the Andropogoneae subfamily, also known as a “supertribe”, comprising the Paspaleae, Andropogoneae, and Arundinelleae tribes. Of particular interest is the Tripsacinae subtribe of the Andropogoneae, wherein any species of the Genus Elionurus, Oxyrhachis, Rhytachne, Tripsacum, Urelytrum, Vossia, or Zea can be used as a pollen donor for performing wide hybridization.

[0238] It is expected that a pollen donor that is stably transformed with a heterologous construct containing a polynucleotide conferring genetic chromosome doubling activity is obtained. For example, a polynucleotide encoding an expression cassette as described in Example 4.

[0239] It is expected the first parent used as the pollen donor provides genetic chromosome doubling activity to the maternal gametophyte of the second parent. As an outcome, it is expected that the haploid (1n) maternal gametophyte contacted with the genetic chromosome doubling activity provides an in vivo diploidized (2n) embryo comprising two sets of maternal chromosomes. Such an in vivo diploidized (2n) embryo is used to obtain a doubled haploid plant, here achieved without treating the maternal cell with a chemical chromosome doubling agent. It is expected that the diploidized (2n) embryo produces a doubled haploid plant, and the progeny thereof, in a manner that is useful for plant breeding.

The application's sequence listing, which the Patent Office published only in electronic form, follows.

SEQUENCE LISTING (103 sequences)

SEQ ID NO: 1 - DNA, 1100 bp, Oryza sativa
ttattattaatttgagaaaacaactaaacttaagatttgatgaatttattactaatttgagaaaacaactaaaattaagatttgatgaatacattttttactcgttaatcataaatttcagaactgttatattataggaaactacgtactctcttggtcctaacaaatattattgttaaactcggtttttgacttggtcctaacaaatattattgttaaactcggtttttgacttctagtttattttttaattttgcgtctatgtattcttataatctaaatataatgtaaactatttaagctgaaattaagaaaatacagctacgaagctccccaaacatgctccgatgcccgtagtttgcgttggccggtgaagcaattaaggtggagtttggatacagggactttaactttagtctctgtatttggatattaatttaaagtattaaatatagactacttacaaaactaattacataaataaaagctaatttgcgagtcaaattttttaagcctatttaatatacaattagagaatatttaatgtagcattatatagactaatcatggattaattaggctcaataaatttgtctcgcgaattagtttaagattatagatgagttttattaatagtctacgtttaatatttataattagtatcaaaacatccgatatgatagttacttaaaaagttttaaaaaggtataaacaccttgcatggcatgcacttcaacctaaaatcgatgtcaattttacttttaaaaaaacttgtactaaaatcaaagcagcgcggcgtgtcgcaggggcatcagtaataatcaccatcccgctcgtgcgcgcgcgttcataccgcatgcatttgcatgcacacacacgcgtagcactagtactctctctctctctctgtgttgataaccccaatacaaatgcagggcttctctctctacctctgctatttgctgagactagaaaggaagagtctatctagggcttgctgcccataaagacgacaagaaccacctctctctctctctctcactgtccacatctctccaacaagagaaatactttacacacttgcagcaactcttccccag

SEQ ID NO: 2 - protein, 447 aa, Saccharomyces cerevisiae
MREVISINVGQAGCQIGNACWELYSLEHGIKPDGHLEDGLSKPKGGEEGFSTFFHETGYGKFVPRAIYVDLEPNVIDEVRNGPYKDLFHPEQLISGKEDAANNYARGHYTVGREILGDVLDRIRKLADQCDGLQGFLFTHSLGGGTGSGLGSLLLEELSAEYGKKSKLEFAVYPAPQVSTSVVEPYNTVLTTHTTLEHADCTFMVDNEAIYDMCKRNLDIPRPSFANLNNLIAQVVSSVTASLRFDGSLNVDLNEFQTNLVPYPRIHFPLVSYSPVLSKSKAFHESNSVSEITNACFEPGNQMVKCDPRDGKYMATCLLYRGDVVTRDVQRAVEQVKNKKTVQLVDWCPTGFKIGICYEPPTATPNSQLATVDRAVCMLSNTTSIAEAWKRIDRKFDLMYAKRAFVHWYVGEGMEEGEFTEAREDLAALERDYIEVGADSYAEEEEF

SEQ ID NO: 3 - protein, 447 aa, Saccharomyces cerevisiae
MREVISINVGQAGCQIGNACWELYSLEHGIKPDGHLEDGLSKPKGGEEGFSTFFHETGYGKFVPRAIYVDLEPNVIDEVRNGPYKDLFHPEQLISGKEDAANNYARGHYTVGREILGDVLDRIRKLADQCDGLQGFLFTHSLGGGTGSGLGSLLLEELSAEYGKKSKLEFAVYPAPQVSTSVVEPYNTVLTTHTTLEHADCTFMVDNEAIYDMCKRNLDIPRPSFANLNNLIAQVVSSVTASLRFDGSLNVALNAFQTNLVPYPRIHFPLVSYSPVLSKSKAFHESNSVSEITNACFEPGNQMVKCDPRDGKYMATCLLYRGDVVTRDVQRAVEQVKNKKTVQLVDWCPTGFKIGICYEPPTATPNSQLATVDRAVCMLSNTTSIAEAWKRIDRKFDLMYAKRAFVHWYVGEGMEEGEFTEAREDLAALERDYIEVGADSYAEEEEF

SEQ ID NO: 4 - DNA, 1344 bp, Saccharomyces cerevisiae
atgagagaagttattagtattaatgtcggtcaagctggttgtcagattggtaatgcctgttgggaattatattcccttgagcacggtattaagccggatggacatctagaagatggcctttcaaagccgaagggaggagaagagggtttctccacgtttttccatgaaaccggctacggtaagttcgttccaagggctatttacgtggatttagagcccaacgttattgacgaagtccgtaacggtccttacaaggacttgttccatccagaacagttgatcagtggtaaggaggacgcggctaataattatgcaagaggccattacaccgttggtagagaaattttgggcgatgttctggataggattagaaaactggcagaccaatgtgatgggttacaagggttcttgtttacccattctcttggtggtggtactggttccggtctagggtccttactgttggaagaactatccgctgaatacggtaagaaatccaagctggaatttgccgtataccctgctccacaagtgtctacttctgtggttgagccttacaacacagttttaactacacatactacattggaacatgcagattgtactttcatggtcgataatgaggctatttacgacatgtgcaaaagaaacttggatatcccaagaccaagctttgcaaacttaaacaacctaattgctcaagtggtatcatctgttacagcatcattgagattcgacggttcattaaatgtagatttgaacgaatttcaaaccaatttggttccatatccaagaattcatttccccttagtttcatattctccagtcttatccaaatcaaaggcattccatgagtccaactctgtgtcagaaattacaaacgcttgttttgaacctggtaaccagatggtcaagtgtgatccaagagatggtaaatacatggctacttgtctgttatacaggggtgatgtggtaacaagagatgttcaaagagctgtcgagcaggtgaaaaacaagaagaccgtccaattggttgattggtgtccaactggtttcaagatcggtatttgctacgaacctccaactgccacaccaaactcacaattggccactgtggatagggccgtctgtatgttgtcaaataccacatccattgctgaggcttggaagagaatcgatagaaaattcgatttaatgtatgccaaacgtgctttcgtccactggtatgtcggtgaaggtatggaagaaggtgaattcaccgaagctagagaagatttggctgctttagaaagagattacatcgaagtgggtgccgactcatacgctgaggaagaggaattttaa

SEQ ID NO: 5 - DNA, 1344 bp, Saccharomyces cerevisiae
atgagagaagttattagtattaatgtcggtcaagctggttgtcagattggtaatgcctgttgggaattatattcccttgagcacggtattaagccggatggacatctagaagatggcctttcaaagccgaagggaggagaagagggtttctccacgtttttccatgaaaccggctacggtaagttcgttccaagggctatttacgtggatttagagcccaacgttattgacgaagtccgtaacggtccttacaaggacttgttccatccagaacagttgatcagtggtaaggaggacgcggctaataattatgcaagaggccattacaccgttggtagagaaattttgggcgatgttctggataggattagaaaactggcagaccaatgtgatgggttacaagggttcttgtttacccattctcttggtggtggtactggttccggtctagggtccttactgttggaagaactatccgctgaatacggtaagaaatccaagctggaatttgccgtataccctgctccacaagtgtctacttctgtggttgagccttacaacacagttttaactacacatactacattggaacatgcagattgtactttcatggtcgataatgaggctatttacgacatgtgcaaaagaaacttggatatcccaagaccaagctttgcaaacttaaacaacctaattgctcaagtggtatcatctgttacagcatcattgagattcgacggttcattaaatgtagctttgaacgcatttcaaaccaatttggttccatatccaagaattcatttccccttagtttcatattctccagtcttatccaaatcaaaggcattccatgagtccaactctgtgtcagaaattacaaacgcttgttttgaacctggtaaccagatggtcaagtgtgatccaagagatggtaaatacatggctacttgtctgttatacaggggtgatgtggtaacaagagatgttcaaagagctgtcgagcaggtgaaaaacaagaagaccgtccaattggttgattggtgtccaactggtttcaagatcggtatttgctacgaacctccaactgccacaccaaactcacaattggccactgtggatagggccgtctgtatgttgtcaaataccacatccattgctgaggcttggaagagaatcgatagaaaattcgatttaatgtatgccaaacgtgctttcgtccactggtatgtcggtgaaggtatggaagaaggtgaattcaccgaagctagagaagatttggctgctttagaaagagattacatcgaagtgggtgccgactcatacgctgaggaagaggaattttaa

SEQ ID NO: 6 - DNA, 4684 bp, Artificial Sequence
  Pollen-inhibitor PTU
  misc_feature (42)..(42): n is a, c, g, or t
  misc_feature (2243)..(2244): n is a, c, g, or t
agcttgcatgcctgcaggtcgactctagaggatctgcaccgnacactgtctggtggcataccagacagtccggtgtgccagatcagggcacccttcggttcctttgctcctttgcttttgaaccctaactttgatcgtttattggtttgtgttgaacctttatgcacctgtggaatatataatctagaacaaactagttagtccaatcatttgtgttgggcattcaaccaccaaaattatttataggaaaaggttaaaccttatttccctttcaatctccccctttttggtgattgatgccaacacaaaccaaagaaaatatataagtgcagaattgaactagtttgcataaggtaagtgcataggttacttagaattaaatcaatttatacttttacttgatatgcatggttgctttcttttattttaacattttggaccacatttgcaccacttgttttgttttttgcaaatctttttggaaattctttttgcaaagtcttttgcaaatagtcaaaggtatatgaataagattgtaagaagcattttcaagatttgaaatttctccccctgtttcaaatgcttttcctttgactaaacaaaactccccctgaataaaattctcctcttagctttcaagagggttttaaatagatatcaattggaaatatatttagatgctaattttgaaaatataccaattgaaaatcaacataccaatttgaaattaaacataccaatttaaaaaatttcaaaaagtggtggtgcggtccttttgctttgggcttaatatttctccccctttggcattaacggccaaaaaacggagactttgtgagccatttatactttctccccattggtaaatgaaatatgagtgaaagattataccaaatttggacagtgatgcggagtgacggcgaaggataaacgataccgttagagtggagtggaagccttgtcttcgccgaagactccatttccctttcaatctacgacttagcatagaaatacacttgaaaacacattagtcgtagccacgaaagagatatgatcaaaggtatacaaatgagctatgtgtgtaatgtttcaatcaaagtttcgagaatcaagaatatttagctcattcctaagtttgctaaaggttttatcatctaatggtttggtaaagatatcgactaattgttctttggtgctaacataagcaatctcgatatcacccctttgttggtgatccctcaaaaagtgataccgaatgtctatgtgcttagtgcggctgtgttcaacgggattatccgccatgcagatagcactctctcattgtcacataggagagggactttgctcaatttgtagccatagtccctaaggttttgcctcatccaaagtaattgcacacaacaatgtcctgcggcaatatacttggcttcggcggtagaaagagctattgagttttgtttctttgaagtccaagacaccagggatctccctagaaactgacaagtccctgatgtgctcttcctatcaattttacaccctgcccaatcggcatctgaatatcctattaaatcaaaggtggatcccttggggtaccaaatttaaggagtgtaaactaaatatctcatgattcttttcacggccctaaggtgaacttccttaggatcggcttggaatcttgcacacatgcatatagaaagcatagctatctggtcgagatgcacataaatagagtaaagatcctatcatcgaccggtataccttttggtcgtacggatttacctcccgtgtcgaggtcgagatgcccattagttcccatgggtgtacctgatgggcttggcatccttcattccaaacttgttgagtatgtcttgaatgtactttgtttggctgatgaaggtgccatcttggagttgcttgacttgaaatcctagaaaatatttcaacttccccatcatagacatctcgaatttcggaatcatgatcctactaaactcttcacaagtagatttgttagtagacccaaatataatatcatcaacataaatttggcatacaaacaaaacttttgaaatggttttagtaaagagagtaggatcggctttactgactctgaagccattagtgataagaaaatctcttaggcattcataccatgctgttggggcttgcttgagcccataaagcgcctttgagagtttataaacatggttagggtactcactatcttcaaagccgagaggttnntcaacatagacctattcaccccatttgatcacttttttggtccttcaggatctaatagttatgtataatttagagtctcttgtttaatggccagatatttctaattaatctaagaatttatgatattttttaattttttatcatgtctgatgagaattaacataaaggctcaattgggtcctgaattaataatagagtgaaaattaatccagaggctctattagaaccttcaattagtaataccaagatatatataagatagtagagtatagtttaaatgttggcattgttcattctttcttttgttatttaatttatgctttccacggtggttagtggttacttctgaagggtccaaataatgcatgaagagtttgaggacaagaagtctgccctaaaaatagcgatgcaaaggcatggtgtccaagccatacatatagcgcactaattttatcagcagaacaatggtatttataggtcctagtgcccaggcaacaagagacacgaataaagcatcgatcacgacaccatggcggcgacaatggcagtgacgacgatggtgacgaggagcaaggagagctggtcgtcattgcaggtcccggcggtggcattcccttggaagccacgaggtggcaagaccggcggcctcgagttccctcgccgggcgatgttcgccagcgtcggcctcaacgtgtgcccgggcgtcccggcggggcgcgacccgcgggagcccgatcccaaggtcgtccgggcggcctgcggcctggtccaggcacaagtcctcttccaggggtttaactgggagtcgtgcaagcagcagggaggctggtacaacaggctcaaggcccaggtcgacgacatcgccaaggccggcgtcacgcacgtctggctgcctccaccctcgcactccgtctcgccacaaggctacatgccaggccgcctatacgacctggacgcgtccaagtacggcacggcggcggagctcaagtccctgatagcggcgttccacggcaggggcgtgcagtgcgtggcggacatcgtcatcaaccaccggtgcgcggaaaagaaggacgcgcgcggcgtgtactgcatcttcgagggcgggactcccgacgaccgcctggactggggccccgggatgatctgcagcgacgacacgcagtactcggacgggacggggcaccgcgacacgggcgaggggttcgcggcggcgcccgacatcgaccacctcaacccgcgcgtgcagcgggagctctccgcctggctcaactggctcaggtccgacgccgtggggttcgacggctggcgcctcgacttcgccaagggctactcgccggccgtcgccagaatgtacgtggagagcacggggccgccgagcttcgtcgtcgcggagatatggaactcgctgagctacagcggggacggcaagccggcgcccaaccaggaccagtgccggcaggagctgctggactggacgcgggccgtcggcgggcccgccatggcgttcgacttccccaccaagggcctgctgcaggcgggcgtgcagggggagctgtggcggctgcgcgacagctccggcaacgcggccggcctgatcgggtgggcgcccgagaaggccgtcaccttcgtcgacaaccatgacaccgggtcgacgcagaagctctggccgttcccatccgacaaggtcatgcagggctacgcctacatcctcacccatccaggagtcccctgcattttctacgaccacatgtatagactggaacctgaagcaggagatatccacgctgtctgccatcagggcgcggaacggcatccgcgccgggagcaagctgcggatcctcgtggcggacgcggacgcgtacgtggccgtcgtcgacgagaaggtcatggtgaagatcgggacaaggtacggcgtgagcagcgtggtcccgtcggatttccacccggcggcgcacggcaaggatttactgcgtctgggagaaagcgagcctccgcgtcccggcggggcgccacctctagcagctcagattgctcagtcttgtgctgcattgcaaacacagcagcacgacactgcataacgtcttttccttgagatctgacaaagcagcattagtccgttgatcggtggaagaccactcgtcagtgttgagttgaatgtttgatcaataaaatacggcaatgctgtaagggttgttttttatgccattgataatacactgtactgttcagttgttgaactctatttcttagccatgccaagtgcttttcttattttgaataacattacagcaaaaagttgaaagacaaaaaaaaaaacccccgaacagagtgctttgggtcccaagctactttagactgtgttcggcgttccccctaaatttctccccctatatctcactcacttgtcacatcagcgttctctttcccctatatctccacg

SEQ ID NO: 7 - DNA, 856 bp, Hordeum vulgare
ctctagaactagtggatctcgatgtgtagtctacgagaagggttaaccgtctcttcgtgagaataaccgtggcctaaaaataagccgatgaggataaataaaatgtggtggtacagtacttcaagaggtttactcatcaagaggatgcttttccgatgagctctagtagtacatcggacctcacatacctccattgtggtgaaatattttgtgctcatttagtgatgggtaaattttgtttatgtcactctaggttttgacatttcagttttgccactcttaggttttgacaaataatttccattccgcggcaaaagcaaaacaattttattttacttttaccactcttagctttcacaatgtatcacaaatgccactctagaaattctgtttatgccacagaatgtgaaaaaaaacactcacttatttgaagccaaggtgttcatggcatggaaatgtgacataaagtaacgttcgtgtataagaaaaaattgtactcctcgtaacaagagacggaaacatcatgagacaatcgcgtttggaaggctttgcatcacctttggatgatgcgcatgaatggagtcgtctgcttgctagccttcgcctaccgcccactgagtccgggcggcaactaccatcggcgaacgacccagctgacctctaccgaccggacttgaatgcgctaccttcgtcagcgacgatggccgcgtacgctggcgacgtgcccccgcatgcatggcggcacatggcgagctcagaccgtgcgtggctggctacaaatacgtaccccgtgagtgccctagctagaaacttacacctgcaactgcgagagcgagcgtgtgagtgtagccgagta

SEQ ID NO: 8 - DNA, 685 bp, Discosoma sp
cgccaccatggcctcctccgagaacgtcatcaccgagttcatgcgcttcaaggtgcgcatggagggcaccgtgaacggccacgagttcgagatcgagggcgagggcgagggccgcccctacgagggccacaacaccgtgaagctgaaggtgacgaagggcggccccctgcccttcgcctgggacatcctgtccccccagttccagtacggctccaaggtgtacgtgaagcaccccgccgacatccccgactacaagaagctgtccttccccgagggcttcaagtgggagcgcgtgatgaacttcgaggacggcggcgtggcgaccgtgacccaggactcctccctgcaggacggctgcttcatctacaaggtgaagttcatcggcgtgaacttcccctccgacggccccgtgatgcagaagaagaccatgggctgggaggcctccaccgagcgcctgtacccccgcgacggcgtgctgaagggcgagacccacaaggccctgaagctgaaggacggcggccactacctggtggagttcaagtccatctacatggccaagaagcccgtgcagctgcccggctactactacgtggacgccaagctggacatcacctcccacaacgaggactacaccatcgtggagcagtacgagcgcaccgagggccgccaccacctgttcctgtag

SEQ ID NO: 9 - DNA, 1500 bp, Zea mays
ttgatcatttgttcatctcacatgatagttctaacaatatgcacaaattctatacatatctctcgtagttccataaactacgagagagatataggttttatgaacaaatttatttttagtttatcatatgaagaaatgttcaaaatataaaatgtacatcatgatgagttatacaaatttgtagttgaaaactttttcatttgaattaatttactgctttaaaatgtgtatgcagttggcttgatgtgagacaataagctaaaccacgggttttccatgggtttccacccaattacgggttggtttgggatcaataatgttattggatgggttgggtttaactttcctctagtatttttggttgggtgtgggatggatatcaaagtaattagatttgggtatgggtgggagcggattggattttttgccattagcaggcctatgcacttgtcggcgcacacggctggcgcgtgcacacaccttatcggcagacgccgccgctgctgctgctgatgcttcttcttcttccaccgattgattgagatccaaggaaatgctgggcgcgtttttaaactggctgatcggcttcgtcccatgatctgagatttccttttcagactgttgtatatgtagcggcgacatggataggatatgtatggaccgttttaattaatactaaatatcaatggtttaactcttcactattactcctagctagatgtgaaagctcgccctggaatgcacatgaacaactacaccgagttgggcagtttggcaatgcatgcagttcaagagccacgccggttaacccttcactttgtagttattgcctgcattttgtaaatttggtgtgaacttaattctaatctgtaattctgtatagagaatggtgcatgtactgaactcctgactgatcaaaacgtggggtccactttcctcgccgaaaaagaaaagagaaaaaaaggtttattgtccactttattaaaaactggacttatatatatgcttggaacaaatacttagggggtgtttggttttaggaatctctcaatctaaaataaggtggtgtatcataggtttattactcaaatttggtgggatgatctcattgctcatattagtactaactaactaactatgaggaatgagatggtgatggatcaacccattacattctacaaaccaaacaaaaaagtgaggagtgagaagatggtgaactagctcatttctcaaaccaaacactctattaataaaccaatcgcgtagctaataaatatatgtaacctcgacattctagctacagcttgtggttggtagaaaagcaaatcatgctcaaaataatgtgctccgaaacttcattacatttttcttcacttgagtgtacatacattttttttcccttggccctcttatccttaactaagaagcataaaacgggatttctcagccagttcttagcttctcttataaatacagaccttgtacaacactttcacctcc

SEQ ID NO: 10 - DNA, 204 bp, Zea mays
tctcaggtggccaggatattttttctggccccttcctgccctcttcacactgacccatgtgttgttctatccctggaaagctatacctccttacccctatcagcttctcctcacatctcctctcgtcgccacccatgctatcaccgctctgatcacaagcaaggcaaaccctcactgttctatcaacgcccctcccttagctag

SEQ ID NO: 11 - DNA, 2000 bp, Zea mays
cgttgagaacaaatctggaaggccatccttgccttctgtcgtcgggcgcaccggacagtccggtgcacaccggacactgtccggtgcccgatttccttccttaaacatcgcagccgaccgttgccaaccgttgcagatctggcgcaccggacagtccggtgcacaccggacagtccggtgccactttccgaccgttggccagaccacgtgtcgcgcgcagatttcgcggccgaccgttggctcgggccgaccgttggctcaccggaaagtccggtgcacaccggacagtccggtgaattttagccgtacgccgtcggcaaattcccgagagcagcgtcttcaggtcgaggcagcctggcgcaccggacactgtccggtgcaccaccggagagtccggtgccccagaccgaagcagtcttttggctgtacacagccaactcttcttctttcttcttctctctgtttctattacttagacaagtatattagtacacaaaaccaatgtactaaggcttagaaacatacctttacttgtgatttgcactttgttcatccatgggcatagatttacatttaagcacttgtgttgacactcaatcaccaaaatacttagaaatggcccaaaggcacatttccctttcagtctttcatcgaacatcatggtcacgttcttcataccataaaaactagcattcccataaacatttgtctccacgcttcctccatggtatagtgtcactagggtgtccatctattgcaaacatggattactaactcaataatggctaaatactagtgcctcaatacttactaagtagtaaataaataataactgcttactatatagtaaatattaaatgaccacattaaccgaaattacataatctatgaataatgtacgaaaacaatgtatacatgagatcgcgtacgagtccagctaacggtggagaaggtcaagtcggaaggacacctatatacaaaaaatactattgtcaataaaaaatcggcagcacctcccctataaagtgatgtttctaaaacctacaaagaaataacaacacgatggttgccaacacagaaaactgctaccaacaagtatatgttaaaccctatataatcactcactttcctccatccattacactaacaatatgctaccgacttactaactatataatcactaactatatacacgaacaaataaatacctagctaactatttataataacaaatgaatagctaacagactatacattaaaccaagtaatcttgtgctacaaatttatttttcagacagaaaaatctatttagctaactaattaatacaaattaataccaagcaacgatagatgaacatctagttgtctaattagctaactaattaatacaaattaagtagaatccttaccgtggggagatggggcgcgacgaagtgctcgagcttggggcgcggcgaccggcgacgtgaagcttgggggcgcgggggccggacggcgctgcgggcggcatggcgggcggctgcgggcggcggcgcgggcgcaggaaacaaacgacgggagtgggaggaaggagaaagcggcgcgccggtttagtcctagctcggcgccaagatctgtggcgccgagctaggtgccacgatggccgccgcgtcagcaaagctcggcgccaaggcatgttgcgccgagccgtgttagctcggcgtcatagctcatggtgccgagttttgggtctaaaattgcgtttaagtattctagggatctaaacgcaaatatttttcgaaaatagggccgaaaaacaaaaaaaaatcggtcgtttcgtcgagcacatcgtccagcctatcttgcatgtccatcctctctatggttcgcgagccgcgcgcatggcgctccaaaggaggggcgaggttgaatatagacagatggaatgggtggttctctatttatagcgcatgcagtcgtcccctggcacacctatttatatgtgagcgttcctggcacta

SEQ ID NO: 12 - DNA, 99 bp, Zea mays
gagagatcgatcgatcgagcttaattgcgccactgctcgttatcctcctcttgcattgcattgcaggtcgtagttgagcagcagcaaccactgcacagg

SEQ ID NO: 13 - DNA, 2000 bp, Zea mays
caaccaatcaggatttctttgtagggtcgagagaaggaggaagtactctccatgccatgcacgccacagtattgaatgtttttggcatggtcatactagccgtgtgtctctgttccatttggccagccagctccaattatttggcatgatcatcctgtcatactagcagtagcagcgtcatcttcgccgctggccgccccctgcaggctgcagtgtcacacatgcctaatcctgcagtcctgccttttgccttccaaaccgtgtgagccttccgtgcgctcgtcaagtttatgggctgtatttttccgagaggagcctaatgggccaaaagcaaggccttttgggccaatcacgatgggccttaggacactttctaaggcaagaacatgaacctttttctttttctcatattgtcatctgcgtattgtttcatgaagttgctatgcaacgtcacctgaagttgtaaccaactccacgtcacctgaagttgtaaccaactccacgcatataatattggtcctattttgcagagcgtaggttctgttggatctacctgatcaatagttagcggctagtgtaaataaaatagatcctatgatccatctaagtttgaattttcatgtttaataatcagtatgtgactatttaaactaatcttatttgctaatgttttttcgatatagtttaaaggctgtagaatatacttgaacttaggcaaagtggtgaccgagatgatcaacacatcaatcaagacgttagaagccttgatgaaacattcacgagagacgagcaaggagtctaagacgctaagataaataaaacctagaccaaggcatgtggagaaataaagtcaaacaaatgctactcgacaacatccagcttgtccagtactgcaccagaccagcccagagacaaaaagttcaaaagcatgtaaaaagaacgcaacggtaacacaccagatgtgtccggtgctatgccctatgacataaccaacgccacaatgtgcacgatgtgctctagaatgtgaggccagacgcatccggtggcacaacgaacactttactcatctagggttatagagtggattgcaacatgacttggagatgacgacaacttaccgaacgtcacatttgacgacagatctccaatggccaataactgctggaaagccaatagatacgtcacatggacgcaccaaacgtgtttggtgtctatgtaaaatttgttgtgtatccccacgaccacatttacattgggggctatatatacccccttgctagccaaatagagggtggtagagtatgttgaaattgtaggagagtgtcaagacacttcatcaagtgctctaaccacacaaaaaacacttaacaaaagattagatgagcagcatagtgatttttgtgaattgcttatgctagttaaacacatttatttacccttgttgtaggttagggcctagtgtttagtgttgtttgcatagcgctcttaccactcatacactatttttgtacaccaggggcctgaagtcttacaccaatcgtgtttatggtgtgttcgtcaccgtgtgctaaaggaaacgaagcccacaaggaccgattcaggagaagccattttagagacacacttatgtgtagtcaagtcacatgatctattcatagagttattcgacctagagcttgacccttgtacgggaatttatgcgatgagctttaatgaggactaagaaagctaagatacaattaaacttattccgaaaccgacaattaaagacacttcttgggacggagggagtagctgacgttccgtaatgcatgcaagagaagtgaggagggccacgctagagaagagaagtacagaacggaatgagggacggtggcgcatgtccccgcaagatcctgagctgattctaaatcaagcatttgcttgaccaagtctatgcggcgcagagcccgcccgcgccctatgcttgctccggagctctcgttcgttccctgccgcgg

SEQ ID NO: 14 - DNA, 141 bp, Zea mays
cagccatcgatcaccggccccaacgctagctttagcttcgcctatttacatacccgagcggagaagagaagagaagagaagcgatcgggattgtgggcgagtgcgtgcgttcgtgcagccacagacaggcgtccgggcacc

SEQ ID NO: 15 - DNA, 1870 bp, Zea mays
atcttgcaagagcatccggccggatattgctttgcaaagatttgctagctagcagcacatgagatcgagttatgatctccaggtgtactcatgctctccttatgtttggatatactgatcttggatatctatagaagatccccaggtacaagatcaatgacatacttctgcacacttcgtgggattgtacagaatgatatactacatactgaaggtatgtggtggtcatgattttatatcattgaccttattatctataaagataatattacttggtgttgtttagatgaaaaacaagttacaaactaagtctctaccttacttcacattttaaatgtgtttgagagcaggtatgggatgacttagtaatttgcaaagatcagggggagtttcctcttgatcgaaagaacttgtttatacatcatggtgtactcttttctttgcatgagttttcccctgtttgggtttctcattcaaagtttttaacgaggcaacatcaacataaggcctatgtcgtatcatctatttttcccgtagaggttttcgaggatgatacattatggcatagttattgttgtatttgaactaggtgataagtttatctccctagagttcaaatgaatcaacaatagagtatgactactctccttatttctcccactgggtttttaaggagactcagctaatatgttgatttctcagattttctggcaagattatcttggagaaatattagcctgagttatatgtctcatcatttattttccccactggggtttttgagatgatgactatagacatgttattgttctttggtctagaggtccattggagaacaatatcgtaccatggttcaattgaaccaccgacaattatctataaggataattgagcttgtgttgttcagatggaaacaggttatatgaggagcaacatattgctcctaaattgttttatccccatgaacttcaggaaaatgaagatataaacatcttgcaaacaaagtcttgtgataatcttgctgatctattcacaaaatctctaccatactcaacgttttcagaaatgtgttgaggtgattggtatgagaagactcaagtgtttgcaagatcagggggagtaattctccgtgatatttgacctgttttataccatcatattacactcttttctttgtatgagttttgccttgttaaggttttctcatccaaagtttttaacgaggtaatatcaactaagctatatgcttcatcattcactttttcccacaggggtttttatgcatgatgattacaagcatattcttttggagttcaatatgagttttactcataatccaaaagacattgtgtactccttatttttcccacagggtttttgaggagatgatatattggaagacaacttgcagatgatctagtggacttggattgatcaagggggagtgttacaaaatattgtcatgtgatcaaccctctcccctgacagttttctttcaagggacacaccccttgggagacactgtatccacatgtatataaaccagattatctgcaataaagatctacaactgtcatttgtctctctctcaatctcgttactactgagtatactataacaggttcgaccaaaaatagcaaatggtggtctggcttctcgtcatgcatggttttacacgtgtacaggcgagaaagctcatcttaacaaatttaataacccaaatatatatgcatagaaatacccgaccatttgtttgttgagctagcgtgtggctcgcctttggcctcgcctgacctcaccttatatttctaataataccacgtctccctccttatatttaccctcttctcccaagagaaaaatcgggctc

SEQ ID NO: 16 - DNA, 130 bp, Zea mays
caatgcaaacaccagttttctaccctaaacacaagaacccagatgcataataaaaggtgaaagctagcagaagaggtacctaactctaccctactatagagaaaaagtcagcacattgcaagcaataata

SEQ ID NO: 17 - DNA, 1068 bp, Zea mays
atggcgcccagcagctacgaggtggcggcttccatcctcctctgcgccgaggacagcagcagcatcctggacctcgaagcggaggccgaggaggaagcgctactggcgcggagcggggagcccggcggcggcgcggagttccccgtgccgtccgaggaatgcgtcgccggtttcctggagtctgaggcagcgcacatgccgcgggaggactacgccgagaggctgcgcagcggggggatggatctccgcgtccggacggacgccatcgactggatttggaaggttcacacgtgctacggtttcggccctctcactgcctgcttggccgtcaactacctggaccgcttcctctcgctctaccagcttccggaaggcaaggcttggatgacacagctgctgtccgtggcgtgcttgtccctggccgccaagatggaggagacctacgtcccttcgtccctggacctgcaggccggggacgcgcggtacgtgttcgaggcgaagacgatccagaggatggagctcctggtcctcagcacgctcaagtggaggatgcaagcggtcacccccttgtcgtacgtcgactacttcctccaccggctccgaggcggcgccgcgccgagcagacgcgccgtcctccgatccgcggagctcatcctgtgcatcgccagagggacgcactgcttggatttcaggccctcggagatcgccttggccgtcgccgccaccgtggccggcgaagagcgcgccgtggacatcgacagggccttcacccaccgtgtacataaggagagggtgtcgcgatgcctcgaagcgatccagcaggccaccgccaccatggccctgccgcagccgctgaaaagtgaaggcccgagcagcagcggccgcagggcctcgtcttcctcggccaccgtgccgcggagccccaccggggtgctggacgctggctgcctgagctacaggagagccgccgccgccgccgcctcgcacgcgagctccagctggcgcgacgaggacgacgacgactgccccccggctgtctgcagcaagaggaggaagattagcagatga

SEQ ID NO: 18 - DNA, 1587 bp, Zea mays
atggaccaccacctcacgccgacgccgccgccgccgccgccgccgatggggaactccgcggcgggggcgtcctcgaagccgccgacgccggcgtccacgcccaactcgcgcctcgcctcggcgccgtcctcccgccacgccgccacgccgccgcacgcgtcggcggcggcgtccgccccggcgccggcctcgcgcaccgtctacagcgaccgcttcatccccagccgcaccggatccaacctcgcgctcttcgacctcgccccctcgccctcctccgccgcctcgtcctcgcactcgcacgacgccggccccgcggcctcgtccggatctgcgcagcccgccgcgtcgccctactgcacgctcctccgcgccgcgctcttcggccccgacacgcccgaccgcgtcgcgtcctcggccgccgcgtgctcctcgtcgtcgtcctccttctccccggggccctcgcctgtcggcacccccgccaccgggaacatcttcagattcaagacggaggtgcgccggaacgccaagagggcgcttttttcgggagaccaagaggaggacgcgctgttccccggcattttcaccaccaggggcgcgggaccaaggaaggtgccaaggtcgccgtacaaggtgctggatgcgcccgctttgcaggacgacttctacctcaacctcgtcgattggtcttcacataacgtccttgctgtcgggttgggcaattgcgtttacttgtggaatgcatgcagcagcaaggtcaccaagctttgtgatttgggggtggatgacaatgtttgctctgtggggtgggcgcagcgcggcactcacctagctgtaggcacaaagcaaggaaaagttcagatctgggatgcaactcgttgtaaaagaataagaactatggaaagccatcgcatgcgtgtaggtgctcttgcatggagttcttctttgctttcttctggaagccgtgacaagagcatcctccaccatgatatccgtgctcaagaagattatgttagcaagcttaccgggcataaatctgaggtttgtggactcaagtggtcttatgacaatcgtcagcttgcatccggaggcaatgacaatggactttttgtttggaatccacattcagtacaaccagtactgaagtatactgagcacacagcagctgtcaaagctattgcctggtcacctcatctccacggcctgcttgcatctggtggaggaactgcagatagatgcatacgattctggaatacgaccacaaatacacacttgagttgtgtggacactggcagccaggtctgcaatcttgcgtggtcaaagaatgtgaatgagcttgttagcacccacgggtactcccagaaccagataattgtttggagatatccaacaatgtcgaagcttgccactttgacagggcacacgtaccgagtattgtatttagctatttcccctgacggccagaccatagttactggtgccggtgacgaaacactccgtttttggaacgtgttcccctctccaaagtcccagagctctgatagtctaagttgcatcgggggtacatcgtttgttagaagctacatccgg

SEQ ID NO: 19 - DNA, 1563 bp, Zea mays
atggatcaccaccgcacgccgatggagaactcggcgtcctcgaagccgccgacgccggcgtccacgcccaactcgcgcctcgcatcggcgccgtcaccccgccactccgccacgccgccgcacgcgtccgcgccggcgtccgccccggcgccggcctcgcgcaccgtctacagcgaccgcttcatccccagccgcgccggatccaacctcgcgctcttcgacctcggcccctcgccctcgcccgccgccgccgccgcctcctcgtcctcctcccacgaggccggccccgcggcctcgtccggatctgcgcccgccgcggcgtcgccctactgcgcgctcctccgcgccgcgctcttcgggcccgacacgcccgaccgggtcgcgtcctcggccgccgcgtgctcgtcctcctcctcctccccggggctctcgcctgtgggcacccccgccaccgggaacatcttcagattcaagacggaggtgcgccggaacgccaagagggcgcttttttccggaggggaggaggaggaggacgccctgttccccggcattttcaccaccaggggcgcgggaccaaggaaggtcccgaggtcgccctacaaggtgctggatgcgcctgcgttgcaggacgacttctacctcaacctcgtcgattggtcttcacataacgtcctcgctgttgggttgggcaattgcgtttacctgtggaatgcatgcagcagcaaggtcaccaagctttgcgatttgggggtggatgacaacgtttgttctgtggggtgggcgcagcgcggcactcaccttgcagtaggaacaaatcaaggaaaagttcagatctgggatgcaactcgctgtaaaagaataaggacaatggaaagccatcgcatgcgtgtaggtgctcttgcatggagttcttcgttgctttcttctggaagccgtgacaagagcatcctccaccatgatatccgtgctcaagaagatcatgttagcaagcttaccgggcataaatctgaggtttgtggactcaagtggtcttatgacaatcgtcagcttgcatcgggtggcaatgacaacagactttttgtttggaatccacattcagtacagccagtactgaagtatactgagcacacagcagctgtcaaagctattgcctggtcacctcatctccatgggctgcttgcatctggtggaggaactgcagatagatgcatacgattttggaatacgaccacaaatgcacacttgagctgtgtggacactggcagccaggtctgcaatctcgcgtggtcaaagaatgtaaatgagcttgttagcacccacggctactctcagaaccaaataattgtttggagatatccaacaatgtcgaagcttgccactttgacagggcatacatacagagtattgtacttagctatttcccctgatggccagaccatagttactggtgctggtgatgaaacgctccggttttggaacgtgttcccctctccaaagtcccagagttctgatagtttaagttgtgtcggaggaacatctttcgttagaagctacatccggtga

SEQ ID NO: 20 - DNA, 696 bp, Zea mays
atggaaagccatcgcatgcgtgtaggtgctcttgcatggagttcttcgttgctttcttctggaagccgtgacaagagcatcctccaccatgatatccgtgctcaagaagatcatgttagcaagcttaccgggcataaatctgaggtttgtggactcaagtggtcttatgacaatcgtcagcttgcatcgggtggcaatgacaacagacttttcgtttggaatccacattcagtacagccagtactgaagtatactgagcacacagcagctgtcaaagctattgcctggtcacctcatctccatgggctgcttgcatctggtggaggaactgcagatagatgcatacgattttggaatacgaccacaaatgcacacttgagctgtgtggacactggcagccaggtctgcaatcttgcgtggtcaaagaatgtaaatgagcttgttagcacccacggctactctcagaaccaaataattgtttggagatatccaacaatgtcgaagcttgccactttgacagggcatacatacagagtattgtacttagctatttcccctgatggccagaccatagttactggtgctggtgatgaaacgctccggttttggaacgtgttcccctctccaaagtcccagagttctgacagtttaagttgcgtcggaggaacatctttcgttagaagctacatccggtga

SEQ ID NO: 21 - DNA, 1458 bp, Zea mays
atggcggtggcggcgccggcctcggacgccaagccgcgcctcaacgtgccaccgtccatggcatccgcgctccgcctcgatcccgtggggctgggggcgggaccctctatgccgtccccctcccgccgactcgccgagcctcccaagacgccctccccatccaagaccacctacagcgaccgtttcatcccctgccgctcctcctcccgcctccagaacttcgcgctaatcgactcccctctctccccagccaaggacgacacgccctactcccgcctcctccgcgccgagctctttggccccgattcacccaaacccaccaccgccacctccgcagcctccgcctcgcccaacaccaacctcttccgcttcaagaaagaccactccgctcccacctcacccttcgctaaagctgccgccgcgcaccatgactgcaccgcgggatccggagacgcgccgtcgccgcagaagccacccaggaaggtccccaaaacgccgcataaggtcctggacgcgccctccctgcaggacgacttctatctcaacctcgtcgactggtcctcgcagaacgtgctcgccgtcggcctcggcacctgcgtctacctctggtccgcgtccaatagcaaggtcaccaagctctgcgatttggggcctagggacagcgtatgcgccgtgcattggtcacgggaaggctcttatctttccattggcaccggccttggagatgtccagatttgggatagttctcgctgtaagcggattagaaatatgggaggtcaccaaacaaggactggggtattagcatggagctcatgcatcttgtcgtcgggtagcagggacaagaacatactgcagcatgacatccgtgtccccaatgactatatcagcaagttttctggtcatagatcagaggtttgtggactcgaatggtcgcatgacgaccgcgagcttgcctcaggcggaaatgacaaccagttattagtctggaaccaacgatcgcaacagccagttttgcggttgacagaacatacagctgctgttaaagcaatagcgtggtcaccacatcagcaaggactcctagcatcaggaggtggaacagctgatagatgcatcaggttttggaacacggctaacggaaatgttctgaactcaattgacacaggcagccaggtttgcaaccttgcctggtgcaaaaatgtgaatgagcttgtgagcacacatggatattcccaaaatcagatcatggtgtggaaatacccatccatgtcaaaggttgcaactctaactggacatacgatgcgtgtgctttacctcgcgtcgtcgcctgatggacagaccatagtaacaggggcaggtgacgaaactctacggttctggaacatatttccatcagttagaacacagactcctgtgcgtgatattgggctctcgtcattctcaagaagccacatccggtga

SEQ ID NO: 22 - DNA, 855 bp, Zea mays
atgcgcgaaattctgcatattcagggcggccagtgcggcaaccagattggcagcaaattttgggaagtggtgtgcgatgaacatggcattgatccgaccggccgctatatgggcaccagcgatgtgcagctggaacgcgtgaacgtgtattataacgaagcgagctgcggccgctttgtgccgcgcgcggtgctgatggatctggaaccgggcaccatggatgcggtgcgcaccggcccgtatggccagatttttcgcccggataactttgtgtttggccagagcggcgcgggcaacaactgggcgaaaggccattataccgaaggcgcggaactgattgatagcgtgctggatgtggtgcgcaaagaagcggaaaactgcgattgcctgcagggctttcaggtgtgccatagcctgcacgctggacaccgggaggcaatgcgcgaaattctgcatattcagggcggccagtgcggcaaccagattggcagcaaattttgggaagtggtgtgcgatgaacatggcattgatccgaccggccgctatatgggcaccagcgatgtgcagctggaacgcgtgaacgtgtattataacgaagcgagctgcggccgctttgtgccgcgcgcggtgctgatggatctggaaccgggcaccatggatgcggtgcgcaccggcccgtatggccagatttttcgcccggataactttgtgtttggccagagcggcgcgggcaacaactgggcgaaaggccattataccgaaggcgcggaactgattgatagcgtgctggatgtggtgcgcaaagaagcggaaaactgcgattgcctgcagggctttcaggtgtgccatagcctg

SEQ ID NO: 23 - protein, 355 aa, Zea mays
MAPSSYEVAASILLCAEDSSSILDLEAEAEEEALLARSGEPGGGAEFPVPSEECVAGFLESEAAHMPREDYAERLRSGGMDLRVRTDAIDWIWKVHTCYGFGPLTACLAVNYLDRFLSLYQLPEGKAWMTQLLSVACLSLAAKMEETYVPSSLDLQAGDARYVFEAKTIQRMELLVLSTLKWRMQAVTPLSYVDYFLHRLRGGAAPSRRAVLRSAELILCIARGTHCLDFRPSEIALAVAATVAGEERAVDIDRAFTHRVHKERVSRCLEAIQQATATMALPQPLKSEGPSSSGRRASSSSATVPRSPTGVLDAGCLSYRRAAAAAASHASSSWRDEDDDDCPPAVCSKRRKISR

SEQ ID NO: 24 - protein, 529 aa, Zea mays
MDHHLTPTPPPPPPPMGNSAAGASSKPPTPASTPNSRLASAPSSRHAATPPHASAAASAPAPASRTVYSDRFIPSRTGSNLALFDLAPSPSSAASSSHSHDAGPAASSGSAQPAASPYCTLLRAALFGPDTPDRVASSAAACSSSSSSFSPGPSPVGTPATGNIFRFKTEVRRNAKRALFSGDQEEDALFPGIFTTRGAGPRKVPRSPYKVLDAPALQDDFYLNLVDWSSHNVLAVGLGNCVYLWNACSSKVTKLCDLGVDDNVCSVGWAQRGTHLAVGTKQGKVQIWDATRCKRIRTMESHRMRVGALAWSSSLLSSGSRDKSILHHDIRAQEDYVSKLTGHKSEVCGLKWSYDNRQLASGGNDNGLFVWNPHSVQPVLKYTEHTAAVKAIAWSPHLHGLLASGGGTADRCIRFWNTTTNTHLSCVDTGSQVCNLAWSKNVNELVSTHGYSQNQIIVWRYPTMSKLATLTGHTYRVLYLAISPDGQTIVTGAGDETLRFWNVFPSPKSQSSDSLSCIGGTSFVRSYIR

SEQ ID NO: 25 - protein, 520 aa, Zea mays
MDHHRTPMENSASSKPPTPASTPNSRLASAPSPRHSATPPHASAPASAPAPASRTVYSDRFIPSRAGSNLALFDLGPSPSPAAAAASSSSSHEAGPAASSGSAPAAASPYCALLRAALFGPDTPDRVASSAAACSSSSSSPGLSPVGTPATGNIFRFKTEVRRNAKRALFSGGEEEEDALFPGIFTTRGAGPRKVPRSPYKVLDAPALQDDFYLNLVDWSSHNVLAVGLGNCVYLWNACSSKVTKLCDLGVDDNVCSVGWAQRGTHLAVGTNQGKVQIWDATRCKRIRTMESHRMRVGALAWSSSLLSSGSRDKSILHHDIRAQEDHVSKLTGHKSEVCGLKWSYDNRQLASGGNDNRLFVWNPHSVQPVLKYTEHTAAVKAIAWSPHLHGLLASGGGTADRCIRFWNTTTNAHLSCVDTGSQVCNLAWSKNVNELVSTHGYSQNQIIVWRYPTMSKLATLTGHTYRVLYLAISPDGQTIVTGAGDETLRFWNVFPSPKSQSSDSLSCVGGTSFVRSYIR

SEQ ID NO: 26 - protein, 231 aa, Zea mays
MESHRMRVGALAWSSSLLSSGSRDKSILHHDIRAQEDHVSKLTGHKSEVCGLKWSYDNRQLASGGNDNRLFVWNPHSVQPVLKYTEHTAAVKAIAWSPHLHGLLASGGGTADRCIRFWNTTTNAHLSCVDTGSQVCNLAWSKNVNELVSTHGYSQNQIIVWRYPTMSKLATLTGHTYRVLYLAISPDGQTIVTGAGDETLRFWNVFPSPKSQSSDSLSCVGGTSFVRSYIR

SEQ ID NO: 27 - protein, 485 aa, Zea mays
MAVAAPASDAKPRLNVPPSMASALRLDPVGLGAGPSMPSPSRRLAEPPKTPSPSKTTYSDRFIPCRSSSRLQNFALIDSPLSPAKDDTPYSRLLRAELFGPDSPKPTTATSAASASPNTNLFRFKKDHSAPTSPFAKAAAAHHDCTAGSGDAPSPQKPPRKVPKTPHKVLDAPSLQDDFYLNLVDWSSQNVLAVGLGTCVYLWSASNSKVTKLCDLGPRDSVCAVHWSREGSYLSIGTGLGDVQIWDSSRCKRIRNMGGHQTRTGVLAWSSCILSSGSRDKNILQHDIRVPNDYISKFSGHRSEVCGLEWSHDDRELASGGNDNQLLVWNQRSQQPVLRLTEHTAAVKAIAWSPHQQGLLASGGGTADRCIRFWNTANGNVLNSIDTGSQVCNLAWCKNVNELVSTHGYSQNQIMVWKYPSMSKVATLTGHTMRVLYLASSPDGQTIVTGAGDETLRFWNIFPSVRTQTPVRDIGLSSFSRSHIR

SEQ ID NO: 28 - protein, 285 aa, Zea mays
MREILHIQGGQCGNQIGSKFWEVVCDEHGIDPTGRYMGTSDVQLERVNVYYNEASCGRFVPRAVLMDLEPGTMDAVRTGPYGQIFRPDNFVFGQSGAGNNWAKGHYTEGAELIDSVLDVVRKEAENCDCLQGFQVCHSLHAGHREAMREILHIQGGQCGNQIGSKFWEVVCDEHGIDPTGRYMGTSDVQLERVNVYYNEASCGRFVPRAVLMDLEPGTMDAVRTGPYGQIFRPDNFVFGQSGAGNNWAKGHYTEGAELIDSVLDVVRKEAENCDCLQGFQVCHSL

SEQ ID NO: 29 - DNA, 28362 bp, Artificial Sequence
  RV044054
gtttacccgccaatatatcctgtcaaacactgatagtttaaactgaaggcgggaaacgacaatctgatcatgagcggagaattaagggagtcacgttatgacccccgccgatgacgcgggacaagccgttttacgtttggaactgacagaaccgcaacgttgaaggagccactcagcaagctggtacgattgtaatacgactcactatagggcgaattgagcgctgtttaaacgctcttcaactggaagagcggttacgctgtttaaacgctcttcaactggaagagcggttactaccggttcactagctagctgctaatcgagctagttaccctatgaggtgacatgaagcgctcacggttactatgacggttagcttcacgactgttggtggcagtagcgtacgacttagctatagttccggacttacccttaagcgatttaaatctgcggttaccgaattcgagctcggtaccctgggatctgcccttactttaacgcctctaaccaacacccctttatctttataaggaacaataaacagaatttgccccactgttctaaatcacctaataatatccccagctaaaaacaataaaggtttcctagaattaagacaagcatgactgttcctccaggagggtttggaacattgttgcagtcttgcagatacgggcgaagggtgagaaacagagcggagggctggaggtgacctcggtagtcgacgccggagttgagcttgacaacgacggggcggcccctgatggacttgaggaagtccgatggcgtcttcaccgtcccgccggcgcccgaggcgggcctgtcgctgccgccgccgccgctgctcatcttgcgcgctgtgcccccggcggtgtccctgtgttgcggatcgcgggtgggccaggtggatgcgagggcgacccgtttggactccggccggagccgccggatccctggtcggtgtcagtgccgtttactctgggccccacgtgtcagtaccgtctgtagatgacaacaacccgtcgtccacagtcatgtccaaaatatcctttcttcttttttttcgattcggatatctatcttccttttttttttccaaaaatcttcttgacgcaccagcgcgcacgtttgtggtaaacgccgacacgtcggtcccacgtcgatagaccccacccaccagtgagtagcgtgtacgtattcgggggtgacggacgtgtcgccgtcgtcttgctagtcccattcccatctgagccacacatctctgaacaaaaaaaaggagggaggcctccacgcacatccccctccgtgccacccgccccaaaccctcgcgccgcctccgagacagccgccgcaaccatggccaccgccgccgccgcgtctaccgcgctcactggcgccactaccgctgcgcccaaggcgaggcgccgggcgcacctcctggccacccgccgcgccctcgccgcgcccatcaggtgctcagcggcgtcacccgccatgccgatggctcccccggccaccccgctccggccgtggggccccaccgagccccgcaagggtgctgacatcctcgtcgagtccctcgagcgctgcggcgtccgcgacgtaagtttctgcttctacctttgatatatatataataattatcattaattagtagtaatataatatttcaaatatttttttcaaaataaaagaatgtagtatatagcaattgcttttctgtagtttataacttcgtatagcatacattatacgaagttatacttttctaatatatgaccaaaatttgttaccgaattcaggcgacccatcgctgctttgtctacatcatgttcttcatcatcctccccaggcgacgcgtgctgctgttcttattcagactaccgttcgagtgactgcatggcgtacatctttctgcatcgactttgtacggctacatcgaacatatacacgagatgtctcgtgtgaatagagtcactaatgccttaagcatcggttactccgtagggtacattctgttcttcttatttgtgcatatttttattgttgtttactgattatacgagtagttatacatacatgcacatacatatcatcacatatatcacaatatttttctaaattaaattaaaactaaaaatgactaaatttctaacaccaacgacattgtaatgttttctccaacaactttacctattctacattgttctatttcgaatttcactctataaacaacatagtctacaatggaaaacagtgctttgtacgactatatacgcgatgtgtggctacaacataagacaatatagtcgtttgaagattgaacctatatatcggtacggttaatccgtctatgtacgtgggcatgacgaacacccgtgataacgaaggattaacgtgcacaatcataaatccaaagtaggagcggtgcatgatgagaatcgctctcagtactcgacataatgaaccttacgaggtacaacaggcaggcaggcagggaccaggggccgcctttatttcaggctcgctggccccacgggcgtgctgcgtgcacgaagggcactaccccaacctctcaccgaaaaccgcgctggatcggcaaatcaaacgaggtggtgccccgtgcccactctccacgtccacggcaccatccctctgcagccgctcaccagccatgccgtgtcgcggaacggcacaaccacccccaacccactcacgaaaccccgtcccggccgtgcccgtgtcggtccgcgctcggcaacgaggcggcccgcgctgctgagtcccctggacacccgacaccctgtcggccctttgtttattcatcccgaaatctcatctgcccccacggccgactgcgctgcgccgcccggatatatatacccatcgttatcgatcgactggggactctatcagtgatagagtctagaggatcgctcaggaaggccgctgagatagaggcatggcggccaatgcgggcggcggtggagcgggaggaggcagcggcagcggcagcgtggctgcgccggcggtgtgccgccccagcggctcgcggtggacgccgacgccggagcagatcaggatgctgaaggagctctactacggctgcggcatccggtcgcccagctcggagcagatccagcgcatcaccgccatgctgcggcagcacggcaagatcgagggcaagaacgtcttctactggttccagaaccacaaggcccgcgagcgccagaagcgccgcctcaccagcctcgacgtcaacgtgcccgccgccggcgcggccgacgccaccaccagccaactcggcgtcctctcgctgtcgtcgccgccgccttcaggcgcggcgcctccctcgcccaccctcggcttctacgccgccggcaatggcggcggatcggctgtgctgctggacacgagttccgactggggcagcagcggcgctgccatggccaccgagacatgcttcctgcaggactacatgggcgtgacggacacgggcagctcgtcgcagtggccacgcttctcgtcgtcggacacgataatggcggcggccgcggcgcgggcggcgacgacgcgggcgcccgagacgctccctctcttcccgacctgcggcgacgacggcggcagcggtagcagcagctacttgccgttctggggtgccgcgtccacaactgccggcgccacttcttccgttgcgatccagcagcaacaccagctgcaggagcagtacagcttttacagcaacagcaacagcacccagctggccggcaccggcaaccaagacgtatcggcaacagcagcagcagccgccgccctggagctgagcctcagctcatggtgctccccttaccctgctgcagggagtatgtgagagcaacgcgagctgccactgctcttcactggtaccgttaacagatcattcgacaaagcagcattagtccgttgatcggtggaagaccactcgtcagtgttgagttgaatgtttgatcaataaaatacggcaatgctgtaagggttgttttttatgccattgataatacactgtactgttcagttgttgaactctatttcttagccatgccaagtgcttttcttattttgaataacattacagcaaaaagttgaaagacaaaaaaaaaaacccccgaacagagtgctttgggtcccaagcttctttagactgtgttcggcgttccccctaaatttctccccctatatctcactcacttgtcacatcagcgttctctttccccctatatctccacgctctacagcagttccacctatatcaaacctctataccccaccacaacaatattatatactttcatcttcaactaactcatgtaccttccaatttttttctactaataattatttacgtgcacagaaacttagcaaggagagagagagcggggtgacccaccttgctagttggatattacctcttctcttcaaagtatccttgaacgctcaccggttatcaaatctctacactatagctctgtagtcttgctagatagttagttctttagctctcggtgaccaagcttggcgcgatcaagcttatcgataccgtcgacctcgaagcttggtcacccggtccgggcctagaaggccagcttcaagtttgtacaaaaaagcaggctccggccagaatggcccggaccgggttaccgaattcttaccctagctccctgcggctgttacgcggtcccccatcaatcttctgttcttgcggttgtagcctgtgtaacagtgctagagtatgtatgataaataggttttaagtctgcttacatgacattttttattgtggaagagacatataaaaattagagagagtggttctcatgcaacggcggacggcccggtgctaaaagagcttcaagacaaaataatgaaacaggaagagagtagatttatctaagagccaactttattatatgaatgtgtttattgttggctttagatgatatggtaaggagttagagctaataatagataggctctattattattattattaattaaactcgctctaaggaggaaagtgggaggaagggacgaggacgaagactactggaagcatcgtgcatggatgatggatgtggtgtctcttaatgtaggtggccggaggatgtacgtgttaattgcgcgataagcactcagatccaaccgcaaactacctccacactgacacactgatagagagaaagagagacctccgacgactgccgccgcagatgagccacgtacgtatacgacgtctgccggccggctcaggctgccgccatcaccctgctcgaaagtcgcgttaggcggcgccagctacataggagtatctagtctagccagttagtatactactactgcgctgatgatgaattaactctgcatagatactgtacttgcctccctccaacacccaaccacctcctgctcggctcttaataacttggacacggatcgatgccatccaaggaagaacacgacgacgacgacggaacatccaccatgcaagcttgcatccatacgccgatacgcgtgcatccatccatccaccattatttccattttccaccgatcacacgtacacaggcctatttaaggagcgacatcccactgcaactctcctcaccactcatcaccagctagctctagcaaagcacttgccatctaccgaccgccgcattccaaacagcccgacgagctagcagagcggcaggcacctccctcctcaaggaacccatggccactgtgaacaactggctcgctttctccctctccccgcaggagctgccgccctcccagacgacggactccacactcatctcggccgccaccgccgaccatgtctccggcgatgtctgcttcaacatcccccaagattggagcatgaggggatcagagctttcggcgctcgtcgcggagccgaagctggaggacttcctcggcggcatctccttctccgagcagcatcacaaggccaactgcaacatgatacccagcactagcagcacagtttgctacgcgagctcaggtgctagcaccggctaccatcaccagctgtaccaccagcccaccagctcagcgctccacttcgcggactccgtaatggtggcttcctcggccggtgtccacgacggcggtgccatgctcagcgcggccgccgctaacggtgtcgctggcgctgccagtgccaacggcggcggcatcgggctgtccatgattaagaactggctgcggagccaaccggcgcccatgcagccgagggtggcggcggctgagggcgcgcaggggctctctttgtccatgaacatggcggggacgacccaaggcgctgctggcatgccacttctcgctggagagcgcgcacgggcgcccgagagtgtatcgacgtcagcacagggtggagccgtcgtcgtcacggcgccgaaggaggatagcggtggcagcggtgttgccggcgctctagtagccgtgagcacggacacgggtggcagcggcggcgcgtcggctgacaacacggcaaggaagacggtggacacgttcgggcagcgcacgtcgatttaccgtggcgtgacaaggcatagatggactgggagatatgaggcacatctttgggataacagttgcagaagggaagggcaaactcgtaagggtcgtcaagtctatttaggtggctatgataaagaggagaaagctgctagggcttatgatcttgctgctctgaagtactggggtgccacaacaacaacaaattttccagtgagtaactacgaaaaggagctcgaggacatgaagcacatgacaaggcaggagtttgtagcgtctctgagaaggaagagcagtggtttctccagaggtgcatccatttacaggggagtgactaggcatcaccaacatggaagatggcaagcacggattggacgagttgcagggaacaaggatctttacttgggcaccttcagcacccaggaggaggcagcggaggcgtacgacatcgcggcgatcaagttccgcggcctcaacgccgtcaccaacttcgacatgagccgctacgacgtgaagagcatcctggacagcagcgccctccccatcggcagcgccgccaagcgcctcaaggaggccgaggccgcagcgtccgcgcagcaccaccacgccggcgtggtgagctacgacgtcggccgcatcgcctcgcagctcggcgacggcggagccctggcggcggcgtacggcgcgcactaccacggcgccgcctggccgaccatcgcgttccagccgggcgccgccagcacaggcctgtaccacccgtacgcgcagcagccaatgcgcggcggcgggtggtgcaagcaggagcaggaccacgcggtgatcgcggccgcgcacagcctgcaggacctccaccacctgaacctgggcgcggccggcgcgcacgactttttctcggcagggcagcaggccgccgccgctgcgatgcacggcctgggtagcatcgacagtgcgtcgctcgagcacagcaccggctccaactccgtcgtctacaacggcggggtcggcgacagcaacggcgccagcgccgtcggcggcagtggcggtggctacatgatgccgatgagcgctgccggagcaaccactacatcggcaatggtgagccacgagcaggtgcatgcacgggcctacgacgaagccaagcaggctgctcagatggggtacgagagctacctggtgaacgcggagaacaatggtggcggaaggatgtctgcatgggggactgtcgtgtctgcagccgcggcggcagcagcaagcagcaacgacaacatggccgccgacgtcgggcatggcggcgcgcagctcttcagtgtctggaacgacacttaagcgtacctagtggtacctgacatcttatagtctgcaacctctcgtgtctgaattcctatctttatcaagtgttattgcttccacgactataggacagctttcgtcgaaagcttttgctcatgtgatctcgaaggattcatctagtctgatttttcgtgacttgtatcggttttattggattcatccaacatatatcaataaaaaatgagttgtgtttcctttcttcctagttcagttaaaattatttccctcctgcgcttgtgctgtaattgtctgtgtacctgttgtttgtgactgtgttagttcccttggatatgatttcgtatttgatatgtacatggagatagcttagcttcattattggagtatgaagttagtatgacatagtcactctcctggaaaattgacactgcaaaccatatttttattctgaaccacaaatcctagtcagtccgctggcatatgccgtccgtttgctgaatccagaacgtgggtttggagatgtacggctgagatgcctctatgcgaaggggatttcgtggtgaaacgagatgggagtagagcaacgcccgtggaagatgcttcaaacttccacacttttgagcaacgatcggcagtagtaaggtagacgatttcaagatcaaagcatatgaagataaacaacatcaacaacaaaatttgttggggttctatagagagaaacagagctacatacatacactgttttgtatctaccatctgagatgatgaaaagatgaaaaactaaagaatgccccggcgccaacgccaggacacgccgcgcgcgcgtcacccgagccatctcttgacccagccggcgctgtatatttacacacgttgcagcatcgatcaccacctgttcgatcgcgtcgccgtcaccgggatctgagtcgaaacctagacttgtccatcttctggattggccaacttaattaatgtatgaaataaaaggatgcacacatagtgacatgctaatcactataatgtgggcatcaaagttgtgtgttatgtgtaattactagttatctgaataaaagagaaagagatcatccatatttcttatcctaaatgaatgtcacgtgtctttataattctttgatgaaccagatgcatttcattaaccaaatccatatacatataaatattaatcatatataattaatatcaattgggttagcaaaacaaatctagtctaggtgtgttttgcgaatgcgaccttcttatgtgcttctagtctccaaatgtggttgatagttattttgctctaagatcaacagtaatgaagtataaatcatcgttgtggtgtgctactcggttaattgagcattaacacacacaaacatgacgaggatggtataatctccaaaaatgtgtactttgttaggtgggaccctatagccttgattaatgtgctatgttaggcatgcctggaaacgtgtgacgcatatgttttgtgaacctgttgatattatatgtgcttttatattaccatattttattaaaatactaatatttattactagtaagatataacattctatctagcttaaaaactaaccataaatattccataataactagatttaccaaactaatatactaaatatacataataaatacaaaattaacaagacaataatcaatatttatgagcttaatatatttagacattatggttggtcgacgataatcatgctaacttttcgtaattgcttgattgaaatatgcttagaataatgcctctttgttctacatggcaaatagggaccattatggtgtaacaccctgggaaccacaaacaccccgaaatgctactaaactacacaactaaccttcatatataaaatttcgacagcatctcctttgaaaatttgcatagacgtggaagcaacagagtataaacagatatcatgataagaaaacatactagacattaataatctgctagaaatgggaagaatcctaacttgacgactgcgtaactgactagagtcacacttagctgaccctagtcacttacaactgacttcgtgtcctagatcgatgggccctggccgaagcttggtcacccggtccgggcctagaaggccagcttcaagtttgtaccctggagcttgccgagtgccatccttggacactcgataaagtatattttattttttttattttgccaaccaaactttttgtggtatgttcctacactatgtagatctacatgtaccattttggcacaattacatatttacaaaaatgttttctataaatattagatttagttcgtttatttgaatttcttcggaaaattcacatttaaactgcaagtcactcgaaacatggaaaaccgtgcatgcaaaataaatgatatgcatgttatctagcacaagttacgaccgatttcagaagcagaccagaatcttcaagcaccatgctcactaaacatgaccgtgaacttgttatctagttgtttaaaaattgtataaaacacaaataaagtcagaaattaatgaaacttgtccacatgtcatgatatcatatatagaggttgtgataaaaatttgataatgtttcggtaaagttgtgacgtactatgtgtagaaacctaagtgacctacacataaaatcatagagtttcaatgtagttcactcgacaaagactttgtcaagtgtccgataaaaagtactcgacaaagaagccgttgtcgatgtactgttcgtcgagatctctttgtcgagtgtcacactaggcaaagtctttacggagtgtttttcaggctttgacactcggcaaagcgctcgattccagtagtgacagtaatttgcatcaaaaatagctgagagatttaggccccgtttcaatctcacgggataaagtttagcttcctgctaaactttagctatatgaattgaagtgctaaagtttagtttcaattaccaccattagctctcctgtttagattacaaatggctaaaagtagctaaaaaatagctgctaaagtttatctcgcgagattgaaacagggccttaaaatgagtcaactaatagaccaactaattattagctattagtcgttagcttctttaatctaagctaaaaccaactaatagcttatttgttgaattacaattagctcaacggaattctctgtttttctaaaaaaaaactgcccctctcttacagcaaattgtccgctgcccgtcgtccagatacaatgaacgtacctagtaggaactcttttacacgctcggtcgctcgccgcggatcggagtccccggaacacgacaccactgtggaacacgacaaagtctgctcagaggcggccacaccctggcgtgcaccgagccggagcccggataagcacggtaaggagagtacggcgggacgtggcgacccgtgtgtctgctgccacgcagccttcctccacgtagccgcgcggccgcgccacgtaccagggcccggcgctggtataaatgcgcgccacctccgctttagttctgcatacagccaacccaaggatgtccaacctgctcacggttcaccagaaccttccggctcttccagtggacgcgacgtccgatgaagtcaggaagaacctcatggacatgttccgcgacaggcaagcgttcagcgagcacacctggaagatgctgctctccgtctgccgctcctgggctgcatggtgcaagctgaacaacaggaagtggttccccgctgagcccgaggacgtgagggattaccttctgtacctgcaagcgcgaggtttgtttctgcttctacctttgatatatatataataattatcattaattagtagtaatataatatttcaaatatttttttcaaaataaaagaatgtagtatatagcaattgcttttctgtagtttataagtgtgtatattttaatttataacttttctaatatatgaccaaaacatggtgatgcctaggtctggcagtgaagaccatccagcaacaccttggacaactgaacatgcttcacaggcgctccggcctcccgcgccccagcgactcgaacgccgtgagcctcgtcatgcgccgcatcaggaaggaaaacgtcgatgccggcgaaagggcaaagcaggccctcgcgttcgagaggaccgatttcgaccaggtccgcagcctgatggagaacagcgacaggtgccaggacattaggaacctggcgttcctcggaattgcatacaacacgctcctcaggatcgcggaaattgcccgcattcgcgtgaaggacattagccgcaccgacggcggcaggatgcttatccacattggcaggaccaagacgctcgtttccaccgcaggcgtcgaaaaggccctcagcctcggagtgaccaagctcgtcgaacgctggatctccgtgtccggcgtcgcggacgacccaaacaactacctcttctgccgcgtccgcaagaacggggtggctgcccctagcgccaccagccaactcagcacgagggccttggaaggtattttcgaggccacccaccgcctgatctacggcgcgaaggatgacagcggtcaacgctacctcgcatggtccgggcactccgcccgcgttggagctgctagggacatggcccgcgccggtgtttccatccccgaaatcatgcaggcgggtggatggacgaacgtgaacattgtcatgaactacattcgcaaccttgacagcgagacgggcgcaatggttcgcctcctggaagatggtgactgagctagacccagctttcttgtacaaagtggccgttaacggatccagacttgtccatcttctggattggccaacttaattaatgtatgaaataaaaggatgcacacatagtgacatgctaatcactataatgtgggcatcaaagttgtgtgttatgtgtaattactagttatctgaataaaagagaaagagatcatccatatttcttatcctaaatgaatgtcacgtgtctttataattctttgatgaaccagatgcatttcattaaccaaatccatatacatataaatattaatcatatataattaatatcaattgggttagcaaaacaaatctagtctaggtgtgttttgcgaattgcggcaagctgttaccgaattcctgcccttaaggccaattgttcaagattcattcaacaattgaaacatctcccatgattaaatcagtataaggttgctatggtcttgcttgacaaagtttttttttgagggaatttcaactaaatttttgagtgaaactatcaaatactgattttaaaaaatttttataaaaggaagcgcagagataaaaggccatctatgctacaaaagtacccaaaaatgtaatcctaaagtatgaattgcattttttttttgtttggacgaaaggaaaggagtattaccacaagaatgatatcatcttcatatttagatcttttttgggtaaagcttgagattctctaaatatagagaaatcagaagaaaaaaaaaccgtgttttggtggttttgatttctagcctccacaataactttgacggcgtcgacaagtctaacggacaccaagcagcgaaccaccagcgccgagccaagcgaagcagacggccgagacgttgacaccttcggcgcggcatctctcgagagttccgctccggcgctccacctccaccgctggcggtttcttattccgttccgttccgcctcctgctctgctcctctccacaccacacggcacgaaaccgttacggcaccggcagcacccagcacgggagaggggattcctttcccaccgttccttccctttccgccccgccgctataaatagccagccccatccccagcttttttccccaatctcatctcctctctcctgttgttcggagcacacgcacaatccgatcgatccccaaatccccttcgtctctcctcgcgagcctcgtggatcccagcttcaaggtacggcgatcgatcatcccccctccttctctctaccttcttttctctagactacatcggatggcgatccatggttagggcctgctagtttcccttcctgttttgtcgatggctgcgaggcacaatagatctgatggcgttatgacggctaacttgtcatgttgttgcgatttatagtccctttaggagatcagtttaatttctcggatggttcgagatcggtggtccatggttagtaccctaagatccgcgctgttagggttcgtagatggaggcgacctgttctgattgttaacttgtcagtacctgggaaatcctgggatggttctagctcgtccgcagatgagatcgatttcatgatcctctgtatcttgtttcgttgcctaggttccgtctaatctatccgtggtatgatgtagatgttttgatcgtgctaactacgtcttgtaaagttaattgtcaggtcataatttttagcatgcctttttttttgtttggttttgtctaattgggctgtcgttctagatcagagtagaagactgttccaaactacctgctggatttattgaacttggatctgtatgtgtgtcacatatcttcataaattcatgattaagatggattgaaatatcttttatctttttggtatggatagttctatatgttggtgtggctttgttagatgtatacatgcttagatacatgaagcaacgtgctgctactgtttagtaattgctgttcatttgtctaataaacagataaggatatgtatttatgttgctgttggttttgctggtactttgttggatacaaatgcttcaatacagaaaacagcatgctgctacgatttaccatttatctaatcttatcatatgtctaatctaataaacaaacatgcttttaaattatcttcatatgcttggatgatggcatacacagcggctatgtgtggttttttaaatacccagcatcatgggcatgcatgacactgctttaatatgctttttatttgcttgagactgtttcttttgtttatactgaccctttagttcggtgactcttctgcaggtcgactttaacttagcctaggatccatggcccagtccaagcacggcctgaccaaggagatgaccatgaagtaccgcatggagggctgcgtggacggccacaagttcgtgatcaccggcgagggcatcggctaccccttcaagggcaagcaggccatcaacctgtgcgtggtggagggcggccccttgcccttcgccgaggacatcttgtccgccgccttcatgtacggcaaccgcgtgttcaccgagtacccccaggacatcgtcgactacttcaagaactcctgccccgccggctacacctgggaccgctccttcctgttcgaggacggcgccgtgtgcatctgcaacgccgacatcaccgtgagcgtggaggagaactgcatgtaccacgagtccaagttctacggcgtgaacttccccgccgacggccccgtgatgaagaagatgaccgacaactgggagccctcctgcgagaagatcatccccgtgcccaagcagggcatcttgaagggcgacgtgagcatgtacctgctgctgaaggacggtggccgcttgcgctgccagttcgacaccgtgtacaaggccaagtccgtgccccgcaagatgcccgactggcacttcatccagcacaagctgacccgcgaggaccgcagcgacgccaagaaccagaagtggcacctgaccgagcacgccatcgcctccggctccgccttgccctccggactcagatctcgatagggtaccaatggccagttaacagatccagctgctgctgttctagggttcacaagtctgcctatttgtcttccccaatggagctatggttgtctggtctggtccttggtcgtgtcccgtttcattgtgtactatttacctgtaatgtgtatccttaagtctggtttgatggtgtctgaaacgttttgctgtggtagagcagcatggaagaactataatgaataagtgatccctaatcattgtgtccaaattttgcttctgctatacccttttgtgctgtttcttatgttttgcttaaaaatttgatctgacaaacaaatttgtctaaattatgctcttgttctgactgtgtactgtacacatttgtattgctaccggtttggcacatagttttctctttgattgcagatcaaacccttctgattgcagattgcttggctatggctgatgtgctcactgttcttctttagcttgtatattgctgatggtggcttggctacggctgaaaaagttgctgctgcgccgacttggcaactgttgctccagtaatgctttgtcctctcttcctagccgccgacttggcacttggcagctgttgctcctgtaatgcgttgttatctcttatctcttgagatgtactatgattttgaggctgtttgacttgtgccagattgccagtgctgatgctatattatctcaggtttttatgctagtatatgttttactgtgtgctgcctgtgtcgagttacgtaatctattgaaccgctatgcgtgttgatgccctgttgttgcttgccagattgatgcccctgttgcttgcagcttgcaagctgtagtgaaatcctaaaattcgaaaccaaatctattctgaacttttgaagatctgtgatgtccggaagaaaagattcaaacagataaacgggactctccagaatctataaaataaatgatcgacaaacgctttgctttggtaggcttcctagttagttagcggaccgaagcttcggtccgggcctagaaggccagcttcggccgccccatttcaaatatttttttcaaaataaaagaatgtagtatatagcaattgcttttctgtagtttataacttcgtatagcatacattatacgaagttatacttttctaatatatgaccaaaatttgttgatgtgcaggtcttcgcctaccccggcggcgcgtccatggagatccaccaggcactcacccgctcccccgtcatcgccaaccacctcttccgccacgagcaaggggaggcctttgccgcctccggctacgcgcgctcctcgggccgcgtcggcgtctgcatcgccacctccggccccggcgccaccaacctagtctccgcgctcgccgacgcgctgctcgattccgtccccatggtcgccatcacgggacaggtggcgcgacgcatgattggcaccgacgccttccaggagacgcccatcgtcgaggtcacccgctccatcaccaagcacaactacctggtcctcgacgtcgacgacatcccccgcgtcgtgcaggaggctttcttcctcgcctcctctggtcgaccagggccggtgcttgtcgacatccccaaggacatccagcagcagatggcggtgcctgtctgggacaagcccatgagtctgcctgggtacattgcgcgccttcccaagccccctgcgactgagttgcttgagcaggtgctgcgtcttgttggtgaatcgcggcgccctgttctttatgtgggcggtggctgcgcagcatctggtgaggagttgcgacgctttgtggagctgactggaatcccggtcacaactactcttatgggcctcggcaacttccccagcgacgacccactgtctctgcgcatgctaggtatgcatgggacggtgtatgcaaattatgcagtggataaggccgatctgttgcttgcacttggtgtgcggtttgatgatcgcgtgacagggaagattgaggcttttgcaagcagggctaagattgtgcacgttgatattgatccggctgagattggcaagaacaagcagccacatgtgtccatctgtgcagatgttaagcttgctttgcagggcatgaatgctcttcttgaaggaagcacatcaaagaagagctttgactttggctcatggaacgatgagttggatcagcagaagagggaattcccccttgggtataaaacatctaatgaggagatccagccacaatatgctattcaggttcttgatgagctgacgaaaggcgaggccatcatcggcacaggtgttgggcagcaccagatgtgggcggcacagtactacacttacaagcggccaaggcagtggttgtcttcagctggtcttggggctatgggatttggtttgccggctgctgctggtgcttctgtggcaaacccaggtgtcactgttgttgacatcgatggagatggtagctttctcatgaacgttcaggagctagctatgatccgaattgagaacctcccagtgaaggtctttgtgctaaacaaccagcacctggggatggtggtgcagttggaggacaggttctataaggccaacagagcgcacacatacttgggaaacccagagaatgaaagtgagatatatccagatttcgtgacgatcgccaaagggttcaacattccagcggtccgtgtgacaaagaagaacgaagtccgcgcagcgataaagaagatgctcgagactccagggccgtacctcttggatataatcgtcccacaccaggagcatgtgttgcctatgatccctagtggtggggctttcaaggatatgatcctggatggtgatggcaggactgtgtactgatgactagctagtcagttaacagatctgccagatcctcggtgtacaaataacccgtcttatcctatgagacgggccggcgtcagtgtgttctggaggaatttttatgtcagagcctttttctttgtgtgcttgatgtagatgccaagggaagcttattggctgttgaagcttgatgcaaaataaattatggaactctgttttttgtttatctaataataactagcaaatatgcttccattgcattgaaactaacagccttttgtgtttccaagttttattttgtgacaatgtcatctatttcaattagttgtggaatcggaaacttgcaggactaacttggaaactccaatccctcagcatcctggactttttcctggtgtaatccatgtagatattattttaatcatcattttagttctggaggtttttccatctccggttttgctcccctttcttcaaaaaaaaaaaaaaaatgccgtaggcgccgcaacgcccacctgttgttcaaactcatgggcacgagtggctcgaagattttatacaacaattgctgtagtttcaccgttgctggtgaagaagcatttttttaaaaaaatatagtggtattcattttaattagtttagttgtgcagcgagcaaaatttggacatgctctgctcggaatctgatcgacctagacacagattagcagcagtagctttgtcatctgttccaagagttgcgatctgatagaagaaaaaaaaaccttcccttcaatgtaaaaccgaaactaacaagaaagaagcacagtgccgtttaggcaagtatggagtacgtattaagcatgtagaaggccatgcatgaaccactaacaagaaagaagcgcagtgccattcaggcaagcataagcatgtagattggcatgcatgaacaactaacagtagatcgtctctggtctgattagaagttttttgggaagccaagaaatcatgtacaactggttccatctcaaattccgtggcaaaaagaggcctaagcaacataaagctttccactggttgccatatatgatttgggcatttcactttgatcttaatgggccttgtaaagcccaagactcatgattatctttagttgatgctcttaattaggtgtgggcaaataattcaaactgtatgtacccgaccaaaaccaaagcaaaaataatcgaaccaaaccgaaaatttaaaaataaccgaatgaaaactaaatcctataactgaaagaactgaaaccgaatcaaaatatttaatgtaaccaaaaatatccgaaatataattatattgtcaaaaatattaataatttctagattaaataattaaaaatacttaaaaatttatataaaatagtaaaaatactcgaaaataaccacaaatattcaaaaacaaccgaaatatcccaaaatattcaaagcaaaataaccgaatggataccaaattttaaaaccgaaaaaactggaacaaaaccaaaatcgaaccaaaatttcaaaaatcgaataaatactaaactttagaacaaaaaaaaacgataaccgaatgtatacgaaccaaagccgaattagataaccgaacgtccaggactactcttaatctttccgccacttatgatttgggctattactttgtttataatgagccttttcaagctcaagttcatgattgtccgtgagatgagaaactgacttgttggattcgaaaccctagctagtattggttaatacttaatacataaatgacctgcattgacatcatcatccaagaaaataaaaattgtatgcttgagatatttagttttcctagctaggttttctttattttagtaccgaatctttaggtgtgccacgttaatttagacccattttttcatacttaccaactgagtctagtttaatcatgactataatcgtataaaatgattcagtcgacgtcattgcgaacgtatataaaatcatccaaattgacgtcattccaaagaggtaagcatgcttatctaagagtccgagcatactaaacaagacgacattttatttgcactccaaatcaaattttgtattgcctaaagaaaaacaatcaaactcaagtttcttaaaattaatttcattcaaactaatcactttcaatatctcacatattattcatgccatttctatttgtctaaacatgatttaaaaaaaaaagtaaaatacaaagattactatgcaaaaactctataaaaaaaaattcaaatttcttatttatttgtgacatcaaattttcaaaataatttttttaattatcggttgatccggtcagtcgataaaaacataaactttcagcgaccgttaaaactttcctactaccgatttagagaaaatcttagcttgaaacgtaattgtaacctgccttcatgcaagtcgcaagatatgtcatcctaagttgtatatgttttctcaaaagatgtatttacttgagaaaatacgtttcaacgttgatggacaaccaattaagaatcaagcacctttcgtaatcaatttaggcttatcgtctaaggtatactgatttacgacagttgactagacttataaggaacaaaataatagaatagtttctaaacacttcacctaatcatagagactaagatggtaattcgtaaacgacaaagcctagtgacactgtccattgtaaaattccacatcatattagtattaaacatatacatgtagtttcctgaacacatgtagtatcaaacacacttcgtggcttcttcctcgaaacctgcggccgctcattaattaagtcatctagttgaaggatcgctatcaactttgtatagaaaagttgggccgaattcgagctcggtacggccagaatggcccggaccgaagcttaccggtttgatcatttgttcatctcacatgatagttctaacaatatgcacaaattctatacatatctctcgtagttccataaactacgagagagatataggttttatgaacaaatttatttttagtttatcatatgaagaaatgttcaaaatataaaatgtacatcatgatgagttatacaaatttgtagttgaaaactttttcatttgaattaatttactgctttaaaatgtgtatgcagttggcttgatgtgagacaataagctaaaccacgggttttccatgggtttccacccaattacgggttggtttgggatcaataatgttattggatgggttgggtttaactttcctctagtatttttggttgggtgtgggatggatatcaaagtaattagatttgggtatgggtgggagcggattggattttttgccattagcaggcctatgcacttgtcggcgcacacggctggcgcgtgcacacaccttatcggcagacgccgccgctgctgctgctgatgcttcttcttcttccaccgattgattgagatccaaggaaatgctgggcgcgtttttaaactggctgatcggcttcgtcccatgatctgagatttccttttcagactgttgtatatgtagcggcgacatggataggatatgtatggaccgttttaattaatactaaatatcaatggtttaactcttcactattactcctagctagatgtgaaagctcgccctggaatgcacatgaacaactacaccgagttgggcagtttggcaatgcatgcagttcaagagccacgccggttaacccttcactttgtagttattgcctgcattttgtaaatttggtgtgaacttaattctaatctgtaattctgtatagagaatggtgcatgtactgaactcctgactgatcaaaacgtggggtccactttcctcgccgaaaaagaaaagagaaaaaaaggtttattgtccactttattaaaaactggacttatatatatgcttggaacaaatacttagggggtgtttggttttaggaatctctcaatctaaaataaggtggtgtatcataggtttattactcaaatttggtgggatgatctcattgctcatattagtactaactaactaactatgaggaatgagatggtgatggatcaacccattacattctacaaaccaaacaaaaaagtgaggagtgagaagatggtgaactagctcatttctcaaaccaaacactctattaataaaccaatcgcgtagctaataaatatatgtaacctcgacattctagctacagcttgtggttggtagaaaagcaaatcatgctcaaaataatgtgctccgaaacttcattacatttttcttcacttgagtgtacatacattttttttcccttggccctcttatccttaactaagaagcataaaacgggatttctcagccagttcttagcttctcttataaatacagaccttgtacaacactttcacctcctctcaggtggccaggatattttttctggccccttcctgccctcttcacactgacccatgtgttgttctatccctggaaagctatacctccttacccctatcagcttctcctcacatctcctctcgtcgccacccatgctatcaccgctctgatcacaagcaaggcaaaccctcactgttctatcaacgcccctcccttagctagcctaggcgcgccatttaaatatggcgcccagcagctacgaggtggcggcttccatcctcctctgcgccgaggacagcagcagcatcctggacctcgaagcggaggccgaggaggaagcgctactggcgcggagcggggagcccggcggcggcgcggagttccccgtgccgtccgaggaatgcgtcgccggtttcctggagtctgaggcagcgcacatgccgcgggaggactacgccgagaggctgcgcagcggggggatggatctccgcgtccggacggacgccatcgactggatttggaaggttcacacgtgctacggtttcggccctctcactgcctgcttggccgtcaactacctggaccgcttcctctcgctctaccagcttccggaaggcaaggcttggatgacacagctgctgtccgtggcgtgcttgtccctggccgccaagatggaggagacctacgtcccttcgtccctggacctgcaggccggggacgcgcggtacgtgttcgaggcgaagacgatccagaggatggagctcctggtcctcagcacgctcaagtggaggatgcaagcggtcacccccttgtcgtacgtcgactacttcctccaccggctccgaggcggcgccgcgccgagcagacgcgccgtcctccgatccgcggagctcatcctgtgcatcgccagagggacgcactgcttggatttcaggccctcggagatcgccttggccgtcgccgccaccgtggccggcgaagagcgcgccgtggacatcgacagggccttcacccaccgtgtacataaggagagggtgtcgcgatgcctcgaagcgatccagcaggccaccgccaccatggccctgccgcagccgctgaaaagtgaaggcccgagcagcagcggccgcagggcctcgtcttcctcggccaccgtgccgcggagccccaccggggtgctggacgctggctgcctgagctacaggagagccgccgccgccgccgcctcgcacgcgagctccagctggcgcgacgaggacgacgacgactgccccccggctgtctgcagcaagaggaggaagattagcagatgaatttaaatgcccgggcgatcgctcgaggcgtacctagtggtaccacatggttaacctagacttgtccatcttctggattggccaacttaattaatgtatgaaataaaaggatgcacacatagtgacatgctaatcactataatgtgggcatcaaagttgtgtgttatgtgtaattactagttatctgaataaaagagaaagagatcatccatatttcttatcctaaatgaatgtcacgtgtctttataattctttgatgaaccagatgcatttcattaaccaaatccatatacatataaatattaatcatatataattaatatcaattgggttagcaaaacaaatctagtctaggtgtgttttgcgaatgcggccgccaccgcggtggagctcgaattccggtccgggcctagaaggccagcttcaagtttgtacaaaaaagcaggctccggccagaatggcccggaccgggttaccgaattcgagctcggtaccctgggatccgatatcgatgggccctggccgaagcttggtcacccggtccgggcctagaaggccgatctcccgggcacccagctttcttgtacaaagtggccgttaacggatcggccagaatggcccggaccgaagcttgcatgcctgcagtgcagcgtgacccggtcgtgcccctctctagagataatgagcattgcatgtctaagttataaaaaattaccacatattttttttgtcacacttgtttgaagtgcagtttatctatctttatacatatatttaaactttactctacgaataatataatctatagtactacaataatatcagtgttttagagaatcatataaatgaacagttagacatggtctaaaggacaattgagtattttgacaacaggactctacagttttatctttttagtgtgcatgtgttctcctttttttttgcaaatagcttcacctatataatacttcatccattttattagtacatccatttagggtttagggttaatggtttttatagactaatttttttagtacatctattttattctattttagcctctaaattaagaaaactaaaactctattttagtttttttatttaataatttagatataaaatagaataaaataaagtgactaaaaattaaacaaataccctttaagaaattaaaaaaactaaggaaacatttttcttgtttcgagtagataatgccagcctgttaaacgccgtcgacgagtctaacggacaccaaccagcgaaccagcagcgtcgcgtcgggccaagcgaagcagacggcacggcatctctgtcgctgcctctggacccctctcgagagttccgctccaccgttggacttgctccgctgtcggcatccagaaattgcgtggcggagcggcagacgtgagccggcacggcaggcggcctcctcctcctctcacggcaccggcagctacgggggattcctttcccaccgctccttcgctttcccttcctcgcccgccgtaataaatagacaccccctccacaccctctttccccaacctcgtgttgttcggagcgcacacacacacaaccagatctcccccaaatccacccgtcggcacctccgcttcaaggtacgccgctcgtcctcccccccccccctctctaccttctctagatcggcgttccggtccatgcatggttagggcccggtagttctacttctgttcatgtttgtgttagatccgtgtttgtgttagatccgtgctgctagcgttcgtacacggatgcgacctgtacgtcagacacgttctgattgctaacttgccagtgtttctctttggggaatcctgggatggctctagccgttccgcagacgggatcgatttcatgattttttttgtttcgttgcatagggtttggtttgcccttttcctttatttcaatatatgccgtgcacttgtttgtcgggtcatcttttcatgcttttttttgtcttggttgtgatgatgtggtctggttgggcggtcgttctagatcggagtagaattctgtttcaaactacctggtggatttattaattttggatctgtatgtgtgtgccatacatattcatagttacgaattgaagatgatggatggaaatatcgatctaggataggtatacatgttgatgcgggttttactgatgcatatacagagatgctttttgttcgcttggttgtgatgatgtggtgtggttgggcggtcgttcattcgttctagatcggagtagaatactgtttcaaactacctggtgtatttattaattttggaactgtatgtgtgtgtcatacatcttcatagttacgagtttaagatggatggaaatatcgatctaggataggtatacatgttgatgtgggttttactgatgcatatacatgatggcatatgcagcatctattcatatgctctaaccttgagtacctatctattataataaacaagtatgttttataattattttgatcttgatatacttggatgatggcatatgcagcagctatatgtggatttttttagccctgccttcatacgctatttatttgcttggtactgtttcttttgtcgatgctcaccctgttgtttggtgttacttctgcaggtcgactttaacttagcctaggatccatggcctcctccgagaacgtcatcaccgagttcatgcgcttcaaggtgcgcatggagggcaccgtgaacggccacgagttcgagatcgagggcgagggcgagggccgcccctacgagggccacaacaccgtgaagctgaaggtgaccaagggcggccccctgcccttcgcctgggacatcctgtccccccagttccagtacggctccaaggtgtacgtgaagcaccccgccgacatccccgactacaagaagctgtccttccccgagggcttcaagtgggagcgcgtgatgaacttcgaggacggcggcgtggcgaccgtgacccaggactcctccctgcaggacggctgcttcatctacaaggtgaagttcatcggcgtgaacttcccctccgacggccccgtgatgcagaagaagaccatgggctgggaggcctccaccgagcgcctgtacccccgcgacggcgtgctgaagggcgagacccacaaggccctgaagctgaaggacggcggccactacctggtggagttcaagtccatctacatggccaagaagcccgtgcagctgcccggctactactacgtggacgccaagctggacatcacctcccacaacgaggactacaccatcgtggagcagtacgagcgcaccgagggccgccaccacctgttcctgtagggtaccacatggttaacctagacttgtccatcttctggattggccaacttaattaatgtatgaaataaaaggatgcacacatagtgacatgctaatcactataatgtgggcatcaaagttgtgtgttatgtgtaattactagttatctgaataaaagagaaagagatcatccatatttcttatcctaaatgaatgtcacgtgtctttataattctttgatgaaccagatgcatttcattaaccaaatccatatacatataaatattaatcatatataattaatatcaattgggttagcaaaacaaatctagtctaggtgtgttttgcgaatgcggccgccaccgcggtggagctcgaattccggtccgggcctagaaggccagcttcggccgccccgggcaactttattatacaaagttgatagatcctcatgtcttcatcgtaagcttaaacaggccagaatggcctctggattcagcggcctagaaggccgaagtacttggtcttcctagtcgagtagatcacattcaagcttggtcacccggtccgtcaatattctgattccgatgacttcgtaggttcctagctcaagccgctcgtgtccaagcgtcacttacgattagctaatgattacggcatctaggaccgactagtggcgcgccgactagctagctaaggtaccgagctcgaattcattccgattaatcgtggcctcttgctcttcaggatgaagagctatgtttaaacgtgcaagcgctactagacaattcagtacattaaaaacgtccgcaatgtgttattaagttgtctaagcgtcaatttgtttacaccacaatatatcctgcca

SEQ ID NO: 30 - DNA, 28881 bp, Artificial Sequence
  RX000002
gtttacccgccaatatatcctgtcaaacactgatagtttaaactgaaggcgggaaacgacaatctgatcatgagcggagaattaagggagtcacgttatgacccccgccgatgacgcgggacaagccgttttacgtttggaactgacagaaccgcaacgttgaaggagccactcagcaagctggtacgattgtaatacgactcactatagggcgaattgagcgctgtttaaacgctcttcaactggaagagcggttacgctgtttaaacgctcttcaactggaagagcggttactaccggttcactagctagctgctaatcgagctagttaccctatgaggtgacatgaagcgctcacggttactatgacggttagcttcacgactgttggtggcagtagcgtacgacttagctatagttccggacttacccttaagcgatttaaatctgcggttaccgaattcgagctcggtaccctgggatctgcccttactttaacgcctctaaccaacacccctttatctttataaggaacaataaacagaatttgccccactgttctaaatcacctaataatatccccagctaaaaacaataaaggtttcctagaattaagacaagcatgactgttcctccaggagggtttggaacattgttgcagtcttgcagatacgggcgaagggtgagaaacagagcggagggctggaggtgacctcggtagtcgacgccggagttgagcttgacaacgacggggcggcccctgatggacttgaggaagtccgatggcgtcttcaccgtcccgccggcgcccgaggcgggcctgtcgctgccgccgccgccgctgctcatcttgcgcgctgtgcccccggcggtgtccctgtgttgcggatcgcgggtgggccaggtggatgcgagggcgacccgtttggactccggccggagccgccggatccctggtcggtgtcagtgccgtttactctgggccccacgtgtcagtaccgtctgtagatgacaacaacccgtcgtccacagtcatgtccaaaatatcctttcttcttttttttcgattcggatatctatcttccttttttttttccaaaaatcttcttgacgcaccagcgcgcacgtttgtggtaaacgccgacacgtcggtcccacgtcgatagaccccacccaccagtgagtagcgtgtacgtattcgggggtgacggacgtgtcgccgtcgtcttgctagtcccattcccatctgagccacacatctctgaacaaaaaaaaggagggaggcctccacgcacatccccctccgtgccacccgccccaaaccctcgcgccgcctccgagacagccgccgcaaccatggccaccgccgccgccgcgtctaccgcgctcactggcgccactaccgctgcgcccaaggcgaggcgccgggcgcacctcctggccacccgccgcgccctcgccgcgcccatcaggtgctcagcggcgtcacccgccatgccgatggctcccccggccaccccgctccggccgtggggccccaccgagccccgcaagggtgctgacatcctcgtcgagtccctcgagcgctgcggcgtccgcgacgtaagtttctgcttctacctttgatatatatataataattatcattaattagtagtaatataatatttcaaatatttttttcaaaataaaagaatgtagtatatagcaattgcttttctgtagtttataacttcgtatagcatacattatacgaagttatacttttctaatatatgaccaaaatttgttaccgaattcaggcgacccatcgctgctttgtctacatcatgttcttcatcatcctccccaggcgacgcgtgctgctgttcttattcagactaccgttcgagtgactgcatggcgtacatctttctgcatcgactttgtacggctacatcgaacatatacacgagatgtctcgtgtgaatagagtcactaatgccttaagcatcggttactccgtagggtacattctgttcttcttatttgtgcatatttttattgttgtttactgattatacgagtagttatacatacatgcacatacatatcatcacatatatcacaatatttttctaaattaaattaaaactaaaaatgactaaatttctaacaccaacgacattgtaatgttttctccaacaactttacctattctacattgttctatttcgaatttcactctataaacaacatagtctacaatggaaaacagtgctttgtacgactatatacgcgatgtgtggctacaacataagacaatatagtcgtttgaagattgaacctatatatcggtacggttaatccgtctatgtacgtgggcatgacgaacacccgtgataacgaaggattaacgtgcacaatcataaatccaaagtaggagcggtgcatgatgagaatcgctctcagtactcgacataatgaaccttacgaggtacaacaggcaggcaggcagggaccaggggccgcctttatttcaggctcgctggccccacgggcgtgctgcgtgcacgaagggcactaccccaacctctcaccgaaaaccgcgctggatcggcaaatcaaacgaggtggtgccccgtgcccactctccacgtccacggcaccatccctctgcagccgctcaccagccatgccgtgtcgcggaacggcacaaccacccccaacccactcacgaaaccccgtcccggccgtgcccgtgtcggtccgcgctcggcaacgaggcggcccgcgctgctgagtcccctggacacccgacaccctgtcggccctttgtttattcatcccgaaatctcatctgcccccacggccgactgcgctgcgccgcccggatatatatacccatcgttatcgatcgactggggactctatcagtgatagagtctagaggatcgctcaggaaggccgctgagatagaggcatggcggccaatgcgggcggcggtggagcgggaggaggcagcggcagcggcagcgtggctgcgccggcggtgtgccgccccagcggctcgcggtggacgccgacgccggagcagatcaggatgctgaaggagctctactacggctgcggcatccggtcgcccagctcggagcagatccagcgcatcaccgccatgctgcggcagcacggcaagatcgagggcaagaacgtcttctactggttccagaaccacaaggcccgcgagcgccagaagcgccgcctcaccagcctcgacgtcaacgtgcccgccgccggcgcggccgacgccaccaccagccaactcggcgtcctctcgctgtcgtcgccgccgccttcaggcgcggcgcctccctcgcccaccctcggcttctacgccgccggcaatggcggcggatcggctgtgctgctggacacgagttccgactggggcagcagcggcgctgccatggccaccgagacatgcttcctgcaggactacatgggcgtgacggacacgggcagctcgtcgcagtggccacgcttctcgtcgtcggacacgataatggcggcggccgcggcgcgggcggcgacgacgcgggcgcccgagacgctccctctcttcccgacctgcggcgacgacggcggcagcggtagcagcagctacttgccgttctggggtgccgcgtccacaactgccggcgccacttcttccgttgcgatccagcagcaacaccagctgcaggagcagtacagcttttacagcaacagcaacagcacccagctggccggcaccggcaaccaagacgtatcggcaacagcagcagcagccgccgccctggagctgagcctcagctcatggtgctccccttaccctgctgcagggagtatgtgagagcaacgcgagctgccactgctcttcactggtaccgttaacagatcattcgacaaagcagcattagtccgttgatcggtggaagaccactcgtcagtgttgagttgaatgtttgatcaataaaatacggcaatgctgtaagggttgttttttatgccattgataatacactgtactgttcagttgttgaactctatttcttagccatgccaagtgcttttcttattttgaataacattacagcaaaaagttgaaagacaaaaaaaaaaacccccgaacagagtgctttgggtcccaagcttctttagactgtgttcggcgttccccctaaatttctccccctatatctcactcacttgtcacatcagcgttctctttccccctatatctccacgctctacagcagttccacctatatcaaacctctataccccaccacaacaatattatatactttcatcttcaactaactcatgtaccttccaatttttttctactaataattatttacgtgcacagaaacttagcaaggagagagagagcggggtgacccaccttgctagttggatattacctcttctcttcaaagtatccttgaacgctcaccggttatcaaatctctacactatagctctgtagtcttgctagatagttagttctttagctctcggtgaccaagcttggcgcgatcaagcttatcgataccgtcgacctcgaagcttggtcacccggtccgggcctagaaggccagcttcaagtttgtacaaaaaagcaggctccggccagaatggcccggaccgggttaccgaattcttaccctagctccctgcggctgttacgcggtcccccatcaatcttctgttcttgcggttgtagcctgtgtaacagtgctagagtatgtatgataaataggttttaagtctgcttacatgacattttttattgtggaagagacatataaaaattagagagagtggttctcatgcaacggcggacggcccggtgctaaaagagcttcaagacaaaataatgaaacaggaagagagtagatttatctaagagccaactttattatatgaatgtgtttattgttggctttagatgatatggtaaggagttagagctaataatagataggctctattattattattattaattaaactcgctctaaggaggaaagtgggaggaagggacgaggacgaagactactggaagcatcgtgcatggatgatggatgtggtgtctcttaatgtaggtggccggaggatgtacgtgttaattgcgcgataagcactcagatccaaccgcaaactacctccacactgacacactgatagagagaaagagagacctccgacgactgccgccgcagatgagccacgtacgtatacgacgtctgccggccggctcaggctgccgccatcaccctgctcgaaagtcgcgttaggcggcgccagctacataggagtatctagtctagccagttagtatactactactgcgctgatgatgaattaactctgcatagatactgtacttgcctccctccaacacccaaccacctcctgctcggctcttaataacttggacacggatcgatgccatccaaggaagaacacgacgacgacgacggaacatccaccatgcaagcttgcatccatacgccgatacgcgtgcatccatccatccaccattatttccattttccaccgatcacacgtacacaggcctatttaaggagcgacatcccactgcaactctcctcaccactcatcaccagctagctctagcaaagcacttgccatctaccgaccgccgcattccaaacagcccgacgagctagcagagcggcaggcacctccctcctcaaggaacccatggccactgtgaacaactggctcgctttctccctctccccgcaggagctgccgccctcccagacgacggactccacactcatctcggccgccaccgccgaccatgtctccggcgatgtctgcttcaacatcccccaagattggagcatgaggggatcagagctttcggcgctcgtcgcggagccgaagctggaggacttcctcggcggcatctccttctccgagcagcatcacaaggccaactgcaacatgatacccagcactagcagcacagtttgctacgcgagctcaggtgctagcaccggctaccatcaccagctgtaccaccagcccaccagctcagcgctccacttcgcggactccgtaatggtggcttcctcggccggtgtccacgacggcggtgccatgctcagcgcggccgccgctaacggtgtcgctggcgctgccagtgccaacggcggcggcatcgggctgtccatgattaagaactggctgcggagccaaccggcgcccatgcagccgagggtggcggcggctgagggcgcgcaggggctctctttgtccatgaacatggcggggacgacccaaggcgctgctggcatgccacttctcgctggagagcgcgcacgggcgcccgagagtgtatcgacgtcagcacagggtggagccgtcgtcgtcacggcgccgaaggaggatagcggtggcagcggtgttgccggcgctctagtagccgtgagcacggacacgggtggcagcggcggcgcgtcggctgacaacacggcaaggaagacggtggacacgttcgggcagcgcacgtcgatttaccgtggcgtgacaaggcatagatggactgggagatatgaggcacatctttgggataacagttgcagaagggaagggcaaactcgtaagggtcgtcaagtctatttaggtggctatgataaagaggagaaagctgctagggcttatgatcttgctgctctgaagtactggggtgccacaacaacaacaaattttccagtgagtaactacgaaaaggagctcgaggacatgaagcacatgacaaggcaggagtttgtagcgtctctgagaaggaagagcagtggtttctccagaggtgcatccatttacaggggagtgactaggcatcaccaacatggaagatggcaagcacggattggacgagttgcagggaacaaggatctttacttgggcaccttcagcacccaggaggaggcagcggaggcgtacgacatcgcggcgatcaagttccgcggcctcaacgccgtcaccaacttcgacatgagccgctacgacgtgaagagcatcctggacagcagcgccctccccatcggcagcgccgccaagcgcctcaaggaggccgaggccgcagcgtccgcgcagcaccaccacgccggcgtggtgagctacgacgtcggccgcatcgcctcgcagctcggcgacggcggagccctggcggcggcgtacggcgcgcactaccacggcgccgcctggccgaccatcgcgttccagccgggcgccgccagcacaggcctgtaccacccgtacgcgcagcagccaatgcgcggcggcgggtggtgcaagcaggagcaggaccacgcggtgatcgcggccgcgcacagcctgcaggacctccaccacctgaacctgggcgcggccggcgcgcacgactttttctcggcagggcagcaggccgccgccgctgcgatgcacggcctgggtagcatcgacagtgcgtcgctcgagcacagcaccggctccaactccgtcgtctacaacggcggggtcggcgacagcaacggcgccagcgccgtcggcggcagtggcggtggctacatgatgccgatgagcgctgccggagcaaccactacatcggcaatggtgagccacgagcaggtgcatgcacgggcctacgacgaagccaagcaggctgctcagatggggtacgagagctacctggtgaacgcggagaacaatggtggcggaaggatgtctgcatgggggactgtcgtgtctgcagccgcggcggcagcagcaagcagcaacgacaacatggccgccgacgtcgggcatggcggcgcgcagctcttcagtgtctggaacgacacttaagcgtacctagtggtacctgacatcttatagtctgcaacctctcgtgtctgaattcctatctttatcaagtgttattgcttccacgactataggacagctttcgtcgaaagcttttgctcatgtgatctcgaaggattcatctagtctgatttttcgtgacttgtatcggttttattggattcatccaacatatatcaataaaaaatgagttgtgtttcctttcttcctagttcagttaaaattatttccctcctgcgcttgtgctgtaattgtctgtgtacctgttgtttgtgactgtgttagttcccttggatatgatttcgtatttgatatgtacatggagatagcttagcttcattattggagtatgaagttagtatgacatagtcactctcctggaaaattgacactgcaaaccatatttttattctgaaccacaaatcctagtcagtccgctggcatatgccgtccgtttgctgaatccagaacgtgggtttggagatgtacggctgagatgcctctatgcgaaggggatttcgtggtgaaacgagatgggagtagagcaacgcccgtggaagatgcttcaaacttccacacttttgagcaacgatcggcagtagtaaggtagacgatttcaagatcaaagcatatgaagataaacaacatcaacaacaaaatttgttggggttctatagagagaaacagagctacatacatacactgttttgtatctaccatctgagatgatgaaaagatgaaaaactaaagaatgccccggcgccaacgccaggacacgccgcgcgcgcgtcacccgagccatctcttgacccagccggcgctgtatatttacacacgttgcagcatcgatcaccacctgttcgatcgcgtcgccgtcaccgggatctgagtcgaaacctagacttgtccatcttctggattggccaacttaattaatgtatgaaataaaaggatgcacacatagtgacatgctaatcactataatgtgggcatcaaagttgtgtgttatgtgtaattactagttatctgaataaaagagaaagagatcatccatatttcttatcctaaatgaatgtcacgtgtctttataattctttgatgaaccagatgcatttcattaaccaaatccatatacatataaatattaatcatatataattaatatcaattgggttagcaaaacaaatctagtctaggtgtgttttgcgaatgcgaccttcttatgtgcttctagtctccaaatgtggttgatagttattttgctctaagatcaacagtaatgaagtataaatcatcgttgtggtgtgctactcggttaattgagcattaacacacacaaacatgacgaggatggtataatctccaaaaatgtgtactttgttaggtgggaccctatagccttgattaatgtgctatgttaggcatgcctggaaacgtgtgacgcatatgttttgtgaacctgttgatattatatgtgcttttatattaccatattttattaaaatactaatatttattactagtaagatataacattctatctagcttaaaaactaaccataaatattccataataactagatttaccaaactaatatactaaatatacataataaatacaaaattaacaagacaataatcaatatttatgagcttaatatatttagacattatggttggtcgacgataatcatgctaacttttcgtaattgcttgattgaaatatgcttagaataatgcctctttgttctacatggcaaatagggaccattatggtgtaacaccctgggaaccacaaacaccccgaaatgctactaaactacacaactaaccttcatatataaaatttcgacagcatctcctttgaaaatttgcatagacgtggaagcaacagagtataaacagatatcatgataagaaaacatactagacattaataatctgctagaaatgggaagaatcctaacttgacgactgcgtaactgactagagtcacacttagctgaccctagtcacttacaactgacttcgtgtcctagatcgatgggccctggccgaagcttggtcacccggtccgggcctagaaggccagcttcaagtttgtaccctggagcttgccgagtgccatccttggacactcgataaagtatattttattttttttattttgccaaccaaactttttgtggtatgttcctacactatgtagatctacatgtaccattttggcacaattacatatttacaaaaatgttttctataaatattagatttagttcgtttatttgaatttcttcggaaaattcacatttaaactgcaagtcactcgaaacatggaaaaccgtgcatgcaaaataaatgatatgcatgttatctagcacaagttacgaccgatttcagaagcagaccagaatcttcaagcaccatgctcactaaacatgaccgtgaacttgttatctagttgtttaaaaattgtataaaacacaaataaagtcagaaattaatgaaacttgtccacatgtcatgatatcatatatagaggttgtgataaaaatttgataatgtttcggtaaagttgtgacgtactatgtgtagaaacctaagtgacctacacataaaatcatagagtttcaatgtagttcactcgacaaagactttgtcaagtgtccgataaaaagtactcgacaaagaagccgttgtcgatgtactgttcgtcgagatctctttgtcgagtgtcacactaggcaaagtctttacggagtgtttttcaggctttgacactcggcaaagcgctcgattccagtagtgacagtaatttgcatcaaaaatagctgagagatttaggccccgtttcaatctcacgggataaagtttagcttcctgctaaactttagctatatgaattgaagtgctaaagtttagtttcaattaccaccattagctctcctgtttagattacaaatggctaaaagtagctaaaaaatagctgctaaagtttatctcgcgagattgaaacagggccttaaaatgagtcaactaatagaccaactaattattagctattagtcgttagcttctttaatctaagctaaaaccaactaatagcttatttgttgaattacaattagctcaacggaattctctgtttttctaaaaaaaaactgcccctctcttacagcaaattgtccgctgcccgtcgtccagatacaatgaacgtacctagtaggaactcttttacacgctcggtcgctcgccgcggatcggagtccccggaacacgacaccactgtggaacacgacaaagtctgctcagaggcggccacaccctggcgtgcaccgagccggagcccggataagcacggtaaggagagtacggcgggacgtggcgacccgtgtgtctgctgccacgcagccttcctccacgtagccgcgcggccgcgccacgtaccagggcccggcgctggtataaatgcgcgccacctccgctttagttctgcatacagccaacccaaggatgtccaacctgctcacggttcaccagaaccttccggctcttccagtggacgcgacgtccgatgaagtcaggaagaacctcatggacatgttccgcgacaggcaagcgttcagcgagcacacctggaagatgctgctctccgtctgccgctcctgggctgcatggtgcaagctgaacaacaggaagtggttccccgctgagcccgaggacgtgagggattaccttctgtacctgcaagcgcgaggtttgtttctgcttctacctttgatatatatataataattatcattaattagtagtaatataatatttcaaatatttttttcaaaataaaagaatgtagtatatagcaattgcttttctgtagtttataagtgtgtatattttaatttataacttttctaatatatgaccaaaacatggtgatgcctaggtctggcagtgaagaccatccagcaacaccttggacaactgaacatgcttcacaggcgctccggcctcccgcgccccagcgactcgaacgccgtgagcctcgtcatgcgccgcatcaggaaggaaaacgtcgatgccggcgaaagggcaaagcaggccctcgcgttcgagaggaccgatttcgaccaggtccgcagcctgatggagaacagcgacaggtgccaggacattaggaacctggcgttcctcggaattgcatacaacacgctcctcaggatcgcggaaattgcccgcattcgcgtgaaggacattagccgcaccgacggcggcaggatgcttatccacattggcaggaccaagacgctcgtttccaccgcaggcgtcgaaaaggccctcagcctcggagtgaccaagctcgtcgaacgctggatctccgtgtccggcgtcgcggacgacccaaacaactacctcttctgccgcgtccgcaagaacggggtggctgcccctagcgccaccagccaactcagcacgagggccttggaaggtattttcgaggccacccaccgcctgatctacggcgcgaaggatgacagcggtcaacgctacctcgcatggtccgggcactccgcccgcgttggagctgctagggacatggcccgcgccggtgtttccatccccgaaatcatgcaggcgggtggatggacgaacgtgaacattgtcatgaactacattcgcaaccttgacagcgagacgggcgcaatggttcgcctcctggaagatggtgactgagctagacccagctttcttgtacaaagtggccgttaacggatccagacttgtccatcttctggattggccaacttaattaatgtatgaaataaaaggatgcacacatagtgacatgctaatcactataatgtgggcatcaaagttgtgtgttatgtgtaattactagttatctgaataaaagagaaagagatcatccatatttcttatcctaaatgaatgtcacgtgtctttataattctttgatgaaccagatgcatttcattaaccaaatccatatacatataaatattaatcatatataattaatatcaattgggttagcaaaacaaatctagtctaggtgtgttttgcgaattgcggcaagctgttaccgaattcctgcccttaaggccaattgttcaagattcattcaacaattgaaacatctcccatgattaaatcagtataaggttgctatggtcttgcttgacaaagtttttttttgagggaatttcaactaaatttttgagtgaaactatcaaatactgattttaaaaaatttttataaaaggaagcgcagagataaaaggccatctatgctacaaaagtacccaaaaatgtaatcctaaagtatgaattgcattttttttttgtttggacgaaaggaaaggagtattaccacaagaatgatatcatcttcatatttagatcttttttgggtaaagcttgagattctctaaatatagagaaatcagaagaaaaaaaaaccgtgttttggtggttttgatttctagcctccacaataactttgacggcgtcgacaagtctaacggacaccaagcagcgaaccaccagcgccgagccaagcgaagcagacggccgagacgttgacaccttcggcgcggcatctctcgagagttccgctccggcgctccacctccaccgctggcggtttcttattccgttccgttccgcctcctgctctgctcctctccacaccacacggcacgaaaccgttacggcaccggcagcacccagcacgggagaggggattcctttcccaccgttccttccctttccgccccgccgctataaatagccagccccatccccagcttttttccccaatctcatctcctctctcctgttgttcggagcacacgcacaatccgatcgatccccaaatccccttcgtctctcctcgcgagcctcgtggatcccagcttcaaggtacggcgatcgatcatcccccctccttctctctaccttcttttctctagactacatcggatggcgatccatggttagggcctgctagtttcccttcctgttttgtcgatggctgcgaggcacaatagatctgatggcgttatgacggctaacttgtcatgttgttgcgatttatagtccctttaggagatcagtttaatttctcggatggttcgagatcggtggtccatggttagtaccctaagatccgcgctgttagggttcgtagatggaggcgacctgttctgattgttaacttgtcagtacctgggaaatcctgggatggttctagctcgtccgcagatgagatcgatttcatgatcctctgtatcttgtttcgttgcctaggttccgtctaatctatccgtggtatgatgtagatgttttgatcgtgctaactacgtcttgtaaagttaattgtcaggtcataatttttagcatgcctttttttttgtttggttttgtctaattgggctgtcgttctagatcagagtagaagactgttccaaactacctgctggatttattgaacttggatctgtatgtgtgtcacatatcttcataaattcatgattaagatggattgaaatatcttttatctttttggtatggatagttctatatgttggtgtggctttgttagatgtatacatgcttagatacatgaagcaacgtgctgctactgtttagtaattgctgttcatttgtctaataaacagataaggatatgtatttatgttgctgttggttttgctggtactttgttggatacaaatgcttcaatacagaaaacagcatgctgctacgatttaccatttatctaatcttatcatatgtctaatctaataaacaaacatgcttttaaattatcttcatatgcttggatgatggcatacacagcggctatgtgtggttttttaaatacccagcatcatgggcatgcatgacactgctttaatatgctttttatttgcttgagactgtttcttttgtttatactgaccctttagttcggtgactcttctgcaggtcgactttaacttagcctaggatccatggcccagtccaagcacggcctgaccaaggagatgaccatgaagtaccgcatggagggctgcgtggacggccacaagttcgtgatcaccggcgagggcatcggctaccccttcaagggcaagcaggccatcaacctgtgcgtggtggagggcggccccttgcccttcgccgaggacatcttgtccgccgccttcatgtacggcaaccgcgtgttcaccgagtacccccaggacatcgtcgactacttcaagaactcctgccccgccggctacacctgggaccgctccttcctgttcgaggacggcgccgtgtgcatctgcaacgccgacatcaccgtgagcgtggaggagaactgcatgtaccacgagtccaagttctacggcgtgaacttccccgccgacggccccgtgatgaagaagatgaccgacaactgggagccctcctgcgagaagatcatccccgtgcccaagcagggcatcttgaagggcgacgtgagcatgtacctgctgctgaaggacggtggccgcttgcgctgccagttcgacaccgtgtacaaggccaagtccgtgccccgcaagatgcccgactggcacttcatccagcacaagctgacccgcgaggaccgcagcgacgccaagaaccagaagtggcacctgaccgagcacgccatcgcctccggctccgccttgccctccggactcagatctcgatagggtaccaatggccagttaacagatccagctgctgctgttctagggttcacaagtctgcctatttgtcttccccaatggagctatggttgtctggtctggtccttggtcgtgtcccgtttcattgtgtactatttacctgtaatgtgtatccttaagtctggtttgatggtgtctgaaacgttttgctgtggtagagcagcatggaagaactataatgaataagtgatccctaatcattgtgtccaaattttgcttctgctatacccttttgtgctgtttcttatgttttgcttaaaaatttgatctgacaaacaaatttgtctaaattatgctcttgttctgactgtgtactgtacacatttgtattgctaccggtttggcacatagttttctctttgattgcagatcaaacccttctgattgcagattgcttggctatggctgatgtgctcactgttcttctttagcttgtatattgctgatggtggcttggctacggctgaaaaagttgctgctgcgccgacttggcaactgttgctccagtaatgctttgtcctctcttcctagccgccgacttggcacttggcagctgttgctcctgtaatgcgttgttatctcttatctcttgagatgtactatgattttgaggctgtttgacttgtgccagattgccagtgctgatgctatattatctcaggtttttatgctagtatatgttttactgtgtgctgcctgtgtcgagttacgtaatctattgaaccgctatgcgtgttgatgccctgttgttgcttgccagattgatgcccctgttgcttgcagcttgcaagctgtagtgaaatcctaaaattcgaaaccaaatctattctgaacttttgaagatctgtgatgtccggaagaaaagattcaaacagataaacgggactctccagaatctataaaataaatgatcgacaaacgctttgctttggtaggcttcctagttagttagcggaccgaagcttcggtccgggcctagaaggccagcttcggccgccccatttcaaatatttttttcaaaataaaagaatgtagtatatagcaattgcttttctgtagtttataacttcgtatagcatacattatacgaagttatacttttctaatatatgaccaaaatttgttgatgtgcaggtcttcgcctaccccggcggcgcgtccatggagatccaccaggcactcacccgctcccccgtcatcgccaaccacctcttccgccacgagcaaggggaggcctttgccgcctccggctacgcgcgctcctcgggccgcgtcggcgtctgcatcgccacctccggccccggcgccaccaacctagtctccgcgctcgccgacgcgctgctcgattccgtccccatggtcgccatcacgggacaggtggcgcgacgcatgattggcaccgacgccttccaggagacgcccatcgtcgaggtcacccgctccatcaccaagcacaactacctggtcctcgacgtcgacgacatcccccgcgtcgtgcaggaggctttcttcctcgcctcctctggtcgaccagggccggtgcttgtcgacatccccaaggacatccagcagcagatggcggtgcctgtctgggacaagcccatgagtctgcctgggtacattgcgcgccttcccaagccccctgcgactgagttgcttgagcaggtgctgcgtcttgttggtgaatcgcggcgccctgttctttatgtgggcggtggctgcgcagcatctggtgaggagttgcgacgctttgtggagctgactggaatcccggtcacaactactcttatgggcctcggcaacttccccagcgacgacccactgtctctgcgcatgctaggtatgcatgggacggtgtatgcaaattatgcagtggataaggccgatctgttgcttgcacttggtgtgcggtttgatgatcgcgtgacagggaagattgaggcttttgcaagcagggctaagattgtgcacgttgatattgatccggctgagattggcaagaacaagcagccacatgtgtccatctgtgcagatgttaagcttgctttgcagggcatgaatgctcttcttgaaggaagcacatcaaagaagagctttgactttggctcatggaacgatgagttggatcagcagaagagggaattcccccttgggtataaaacatctaatgaggagatccagccacaatatgctattcaggttcttgatgagctgacgaaaggcgaggccatcatcggcacaggtgttgggcagcaccagatgtgggcggcacagtactacacttacaagcggccaaggcagtggttgtcttcagctggtcttggggctatgggatttggtttgccggctgctgctggtgcttctgtggcaaacccaggtgtcactgttgttgacatcgatggagatggtagctttctcatgaacgttcaggagctagctatgatccgaattgagaacctcccagtgaaggtctttgtgctaaacaaccagcacctggggatggtggtgcagttggaggacaggttctataaggccaacagagcgcacacatacttgggaaacccagagaatgaaagtgagatatatccagatttcgtgacgatcgccaaagggttcaacattccagcggtccgtgtgacaaagaagaacgaagtccgcgcagcgataaagaagatgctcgagactccagggccgtacctcttggatataatcgtcccacaccaggagcatgtgttgcctatgatccctagtggtggggctttcaaggatatgatcctggatggtgatggcaggactgtgtactgatgactagctagtcagttaacagatctgccagatcctcggtgtacaaataacccgtcttatcctatgagacgggccggcgtcagtgtgttctggaggaatttttatgtcagagcctttttctttgtgtgcttgatgtagatgccaagggaagcttattggctgttgaagcttgatgcaaaataaattatggaactctgttttttgtttatctaataataactagcaaatatgcttccattgcattgaaactaacagccttttgtgtttccaagttttattttgtgacaatgtcatctatttcaattagttgtggaatcggaaacttgcaggactaacttggaaactccaatccctcagcatcctggactttttcctggtgtaatccatgtagatattattttaatcatcattttagttctggaggtttttccatctccggttttgctcccctttcttcaaaaaaaaaaaaaaaatgccgtaggcgccgcaacgcccacctgttgttcaaactcatgggcacgagtggctcgaagattttatacaacaattgctgtagtttcaccgttgctggtgaagaagcatttttttaaaaaaatatagtggtattcattttaattagtttagttgtgcagcgagcaaaatttggacatgctctgctcggaatctgatcgacctagacacagattagcagcagtagctttgtcatctgttccaagagttgcgatctgatagaagaaaaaaaaaccttcccttcaatgtaaaaccgaaactaacaagaaagaagcacagtgccgtttaggcaagtatggagtacgtattaagcatgtagaaggccatgcatgaaccactaacaagaaagaagcgcagtgccattcaggcaagcataagcatgtagattggcatgcatgaacaactaacagtagatcgtctctggtctgattagaagttttttgggaagccaagaaatcatgtacaactggttccatctcaaattccgtggcaaaaagaggcctaagcaacataaagctttccactggttgccatatatgatttgggcatttcactttgatcttaatgggccttgtaaagcccaagactcatgattatctttagttgatgctcttaattaggtgtgggcaaataattcaaactgtatgtacccgaccaaaaccaaagcaaaaataatcgaaccaaaccgaaaatttaaaaataaccgaatgaaaactaaatcctataactgaaagaactgaaaccgaatcaaaatatttaatgtaaccaaaaatatccgaaatataattatattgtcaaaaatattaataatttctagattaaataattaaaaatacttaaaaatttatataaaatagtaaaaatactcgaaaataaccacaaatattcaaaaacaaccgaaatatcccaaaatattcaaagcaaaataaccgaatggataccaaattttaaaaccgaaaaaactggaacaaaaccaaaatcgaaccaaaatttcaaaaatcgaataaatactaaactttagaacaaaaaaaaacgataaccgaatgtatacgaaccaaagccgaattagataaccgaacgtccaggactactcttaatctttccgccacttatgatttgggctattactttgtttataatgagccttttcaagctcaagttcatgattgtccgtgagatgagaaactgacttgttggattcgaaaccctagctagtattggttaatacttaatacataaatgacctgcattgacatcatcatccaagaaaataaaaattgtatgcttgagatatttagttttcctagctaggttttctttattttagtaccgaatctttaggtgtgccacgttaatttagacccattttttcatacttaccaactgagtctagtttaatcatgactataatcgtataaaatgattcagtcgacgtcattgcgaacgtatataaaatcatccaaattgacgtcattccaaagaggtaagcatgcttatctaagagtccgagcatactaaacaagacgacattttatttgcactccaaatcaaattttgtattgcctaaagaaaaacaatcaaactcaagtttcttaaaattaatttcattcaaactaatcactttcaatatctcacatattattcatgccatttctatttgtctaaacatgatttaaaaaaaaaagtaaaatacaaagattactatgcaaaaactctataaaaaaaaattcaaatttcttatttatttgtgacatcaaattttcaaaataatttttttaattatcggttgatccggtcagtcgataaaaacataaactttcagcgaccgttaaaactttcctactaccgatttagagaaaatcttagcttgaaacgtaattgtaacctgccttcatgcaagtcgcaagatatgtcatcctaagttgtatatgttttctcaaaagatgtatttacttgagaaaatacgtttcaacgttgatggacaaccaattaagaatcaagcacctttcgtaatcaatttaggcttatcgtctaaggtatactgatttacgacagttgactagacttataaggaacaaaataatagaatagtttctaaacacttcacctaatcatagagactaagatggtaattcgtaaacgacaaagcctagtgacactgtccattgtaaaattccacatcatattagtattaaacatatacatgtagtttcctgaacacatgtagtatcaaacacacttcgtggcttcttcctcgaaacctgcggccgctcattaattaagtcatctagttgaaggatcgctatcaactttgtatagaaaagttgggccgaattcgagctcggtacggccagaatggcccggaccgaagcttaccggtttgatcatttgttcatctcacatgatagttctaacaatatgcacaaattctatacatatctctcgtagttccataaactacgagagagatataggttttatgaacaaatttatttttagtttatcatatgaagaaatgttcaaaatataaaatgtacatcatgatgagttatacaaatttgtagttgaaaactttttcatttgaattaatttactgctttaaaatgtgtatgcagttggcttgatgtgagacaataagctaaaccacgggttttccatgggtttccacccaattacgggttggtttgggatcaataatgttattggatgggttgggtttaactttcctctagtatttttggttgggtgtgggatggatatcaaagtaattagatttgggtatgggtgggagcggattggattttttgccattagcaggcctatgcacttgtcggcgcacacggctggcgcgtgcacacaccttatcggcagacgccgccgctgctgctgctgatgcttcttcttcttccaccgattgattgagatccaaggaaatgctgggcgcgtttttaaactggctgatcggcttcgtcccatgatctgagatttccttttcagactgttgtatatgtagcggcgacatggataggatatgtatggaccgttttaattaatactaaatatcaatggtttaactcttcactattactcctagctagatgtgaaagctcgccctggaatgcacatgaacaactacaccgagttgggcagtttggcaatgcatgcagttcaagagccacgccggttaacccttcactttgtagttattgcctgcattttgtaaatttggtgtgaacttaattctaatctgtaattctgtatagagaatggtgcatgtactgaactcctgactgatcaaaacgtggggtccactttcctcgccgaaaaagaaaagagaaaaaaaggtttattgtccactttattaaaaactggacttatatatatgcttggaacaaatacttagggggtgtttggttttaggaatctctcaatctaaaataaggtggtgtatcataggtttattactcaaatttggtgggatgatctcattgctcatattagtactaactaactaactatgaggaatgagatggtgatggatcaacccattacattctacaaaccaaacaaaaaagtgaggagtgagaagatggtgaactagctcatttctcaaaccaaacactctattaataaaccaatcgcgtagctaataaatatatgtaacctcgacattctagctacagcttgtggttggtagaaaagcaaatcatgctcaaaataatgtgctccgaaacttcattacatttttcttcacttgagtgtacatacattttttttcccttggccctcttatccttaactaagaagcataaaacgggatttctcagccagttcttagcttctcttataaatacagaccttgtacaacactttcacctcctctcaggtggccaggatattttttctggccccttcctgccctcttcacactgacccatgtgttgttctatccctggaaagctatacctccttacccctatcagcttctcctcacatctcctctcgtcgccacccatgctatcaccgctctgatcacaagcaaggcaaaccctcactgttctatcaacgcccctcccttagctagcctaggcgcgccatttaaatatggaccaccacctcacgccgacgccgccgccgccgccgccgccgatggggaactccgcggcgggggcgtcctcgaagccgccgacgccggcgtccacgcccaactcgcgcctcgcctcggcgccgtcctcccgccacgccgccacgccgccgcacgcgtcggcggcggcgtccgccccggcgccggcctcgcgcaccgtctacagcgaccgcttcatccccagccgcaccggatccaacctcgcgctcttcgacctcgccccctcgccctcctccgccgcctcgtcctcgcactcgcacgacgccggccccgcggcctcgtccggatctgcgcagcccgccgcgtcgccctactgcacgctcctccgcgccgcgctcttcggccccgacacgcccgaccgcgtcgcgtcctcggccgccgcgtgctcctcgtcgtcgtcctccttctccccggggccctcgcctgtcggcacccccgccaccgggaacatcttcagattcaagacggaggtgcgccggaacgccaagagggcgcttttttcgggagaccaagaggaggacgcgctgttccccggcattttcaccaccaggggcgcgggaccaaggaaggtgccaaggtcgccgtacaaggtgctggatgcgcccgctttgcaggacgacttctacctcaacctcgtcgattggtcttcacataacgtccttgctgtcgggttgggcaattgcgtttacttgtggaatgcatgcagcagcaaggtcaccaagctttgtgatttgggggtggatgacaatgtttgctctgtggggtgggcgcagcgcggcactcacctagctgtaggcacaaagcaaggaaaagttcagatctgggatgcaactcgttgtaaaagaataagaactatggaaagccatcgcatgcgtgtaggtgctcttgcatggagttcttctttgctttcttctggaagccgtgacaagagcatcctccaccatgatatccgtgctcaagaagattatgttagcaagcttaccgggcataaatctgaggtttgtggactcaagtggtcttatgacaatcgtcagcttgcatccggaggcaatgacaatggactttttgtttggaatccacattcagtacaaccagtactgaagtatactgagcacacagcagctgtcaaagctattgcctggtcacctcatctccacggcctgcttgcatctggtggaggaactgcagatagatgcatacgattctggaatacgaccacaaatacacacttgagttgtgtggacactggcagccaggtctgcaatcttgcgtggtcaaagaatgtgaatgagcttgttagcacccacgggtactcccagaaccagataattgtttggagatatccaacaatgtcgaagcttgccactttgacagggcacacgtaccgagtattgtatttagctatttcccctgacggccagaccatagttactggtgccggtgacgaaacactccgtttttggaacgtgttcccctctccaaagtcccagagctctgatagtctaagttgcatcgggggtacatcgtttgttagaagctacatccggatttaaatgcccgggcgatcgctcgaggcgtacctagtggtaccacatggttaacctagacttgtccatcttctggattggccaacttaattaatgtatgaaataaaaggatgcacacatagtgacatgctaatcactataatgtgggcatcaaagttgtgtgttatgtgtaattactagttatctgaataaaagagaaagagatcatccatatttcttatcctaaatgaatgtcacgtgtctttataattctttgatgaaccagatgcatttcattaaccaaatccatatacatataaatattaatcatatataattaatatcaattgggttagcaaaacaaatctagtctaggtgtgttttgcgaatgcggccgccaccgcggtggagctcgaattccggtccgggcctagaaggccagcttcaagtttgtacaaaaaagcaggctccggccagaatggcccggaccgggttaccgaattcgagctcggtaccctgggatccgatatcgatgggccctggccgaagcttggtcacccggtccgggcctagaaggccgatctcccgggcacccagctttcttgtacaaagtggccgttaacggatcggccagaatggcccggaccgaagcttgcatgcctgcagtgcagcgtgacccggtcgtgcccctctctagagataatgagcattgcatgtctaagttataaaaaattaccacatattttttttgtcacacttgtttgaagtgcagtttatctatctttatacatatatttaaactttactctacgaataatataatctatagtactacaataatatcagtgttttagagaatcatataaatgaacagttagacatggtctaaaggacaattgagtattttgacaacaggactctacagttttatctttttagtgtgcatgtgttctcctttttttttgcaaatagcttcacctatataatacttcatccattttattagtacatccatttagggtttagggttaatggtttttatagactaatttttttagtacatctattttattctattttagcctctaaattaagaaaactaaaactctattttagtttttttatttaataatttagatataaaatagaataaaataaagtgactaaaaattaaacaaataccctttaagaaattaaaaaaactaaggaaacatttttcttgtttcgagtagataatgccagcctgttaaacgccgtcgacgagtctaacggacaccaaccagcgaaccagcagcgtcgcgtcgggccaagcgaagcagacggcacggcatctctgtcgctgcctctggacccctctcgagagttccgctccaccgttggacttgctccgctgtcggcatccagaaattgcgtggcggagcggcagacgtgagccggcacggcaggcggcctcctcctcctctcacggcaccggcagctacgggggattcctttcccaccgctccttcgctttcccttcctcgcccgccgtaataaatagacaccccctccacaccctctttccccaacctcgtgttgttcggagcgcacacacacacaaccagatctcccccaaatccacccgtcggcacctccgcttcaaggtacgccgctcgtcctcccccccccccctctctaccttctctagatcggcgttccggtccatgcatggttagggcccggtagttctacttctgttcatgtttgtgttagatccgtgtttgtgttagatccgtgctgctagcgttcgtacacggatgcgacctgtacgtcagacacgttctgattgctaacttgccagtgtttctctttggggaatcctgggatggctctagccgttccgcagacgggatcgatttcatgattttttttgtttcgttgcatagggtttggtttgcccttttcctttatttcaatatatgccgtgcacttgtttgtcgggtcatcttttcatgcttttttttgtcttggttgtgatgatgtggtctggttgggcggtcgttctagatcggagtagaattctgtttcaaactacctggtggatttattaattttggatctgtatgtgtgtgccatacatattcatagttacgaattgaagatgatggatggaaatatcgatctaggataggtatacatgttgatgcgggttttactgatgcatatacagagatgctttttgttcgcttggttgtgatgatgtggtgtggttgggcggtcgttcattcgttctagatcggagtagaatactgtttcaaactacctggtgtatttattaattttggaactgtatgtgtgtgtcatacatcttcatagttacgagtttaagatggatggaaatatcgatctaggataggtatacatgttgatgtgggttttactgatgcatatacatgatggcatatgcagcatctattcatatgctctaaccttgagtacctatctattataataaacaagtatgttttataattattttgatcttgatatacttggatgatggcatatgcagcagctatatgtggatttttttagccctgccttcatacgctatttatttgcttggtactgtttcttttgtcgatgctcaccctgttgtttggtgttacttctgcaggtcgactttaacttagcctaggatccatggcctcctccgagaacgtcatcaccgagttcatgcgcttcaaggtgcgcatggagggcaccgtgaacggccacgagttcgagatcgagggcgagggcgagggccgcccctacgagggccacaacaccgtgaagctgaaggtgaccaagggcggccccctgcccttcgcctgggacatcctgtccccccagttccagtacggctccaaggtgtacgtgaagcaccccgccgacatccccgactacaagaagctgtccttccccgagggcttcaagtgggagcgcgtgatgaacttcgaggacggcggcgtggcgaccgtgacccaggactcctccctgcaggacggctgcttcatctacaaggtgaagttcatcggcgtgaacttcccctccgacggccccgtgatgcagaagaagaccatgggctgggaggcctccaccgagcgcctgtacccccgcgacggcgtgctgaagggcgagacccacaaggccctgaagctgaaggacggcggccactacctggtggagttcaagtccatctacatggccaagaagcccgtgcagctgcccggctactactacgtggacgccaagctggacatcacctcccacaacgaggactacaccatcgtggagcagtacgagcgcaccgagggccgccaccacctgttcctgtagggtaccacatggttaacctagacttgtccatcttctggattggccaacttaattaatgtatgaaataaaaggatgcacacatagtgacatgctaatcactataatgtgggcatcaaagttgtgtgttatgtgtaattactagttatctgaataaaagagaaagagatcatccatatttcttatcctaaatgaatgtcacgtgtctttataattctttgatgaaccagatgcatttcattaaccaaatccatatacatataaatattaatcatatataattaatatcaattgggttagcaaaacaaatctagtctaggtgtgttttgcgaatgcggccgccaccgcggtggagctcgaattccggtccgggcctagaaggccagcttcggccgccccgggcaactttattatacaaagttgatagatcctcatgtcttcatcgtaagcttaaacaggccagaatggcctctggattcagcggcctagaaggccgaagtacttggtcttcctagtcgagtagatcacattcaagcttggtcacccggtccgtcaatattctgattccgatgacttcgtaggttcctagctcaagccgctcgtgtccaagcgtcacttacgattagctaatgattacggcatctaggaccgactagtggcgcgccgactagctagctaaggtaccgagctcgaattcattccgattaatcgtggcctcttgctcttcaggatgaagagctatgtttaaacgtgcaagcgctactagacaattcagtacattaaaaacgtccgcaatgtgttattaagttgtctaagcgtcaatttgtttacaccacaatatatcctgcca

SEQ ID NO: 31 - DNA, 28857 bp, Artificial Sequence
  RX000003
gtttacccgccaatatatcctgtcaaacactgatagtttaaactgaaggcgggaaacgacaatctgatcatgagcggagaattaagggagtcacgttatgacccccgccgatgacgcgggacaagccgttttacgtttggaactgacagaaccgcaacgttgaaggagccactcagcaagctggtacgattgtaatacgactcactatagggcgaattgagcgctgtttaaacgctcttcaactggaagagcggttacgctgtttaaacgctcttcaactggaagagcggttactaccggttcactagctagctgctaatcgagctagttaccctatgaggtgacatgaagcgctcacggttactatgacggttagcttcacgactgttggtggcagtagcgtacgacttagctatagttccggacttacccttaagcgatttaaatctgcggttaccgaattcgagctcggtaccctgggatctgcccttactttaacgcctctaaccaacacccctttatctttataaggaacaataaacagaatttgccccactgttctaaatcacctaataatatccccagctaaaaacaataaaggtttcctagaattaagacaagcatgactgttcctccaggagggtttggaacattgttgcagtcttgcagatacgggcgaagggtgagaaacagagcggagggctggaggtgacctcggtagtcgacgccggagttgagcttgacaacgacggggcggcccctgatggacttgaggaagtccgatggcgtcttcaccgtcccgccggcgcccgaggcgggcctgtcgctgccgccgccgccgctgctcatcttgcgcgctgtgcccccggcggtgtccctgtgttgcggatcgcgggtgggccaggtggatgcgagggcgacccgtttggactccggccggagccgccggatccctggtcggtgtcagtgccgtttactctgggccccacgtgtcagtaccgtctgtagatgacaacaacccgtcgtccacagtcatgtccaaaatatcctttcttcttttttttcgattcggatatctatcttccttttttttttccaaaaatcttcttgacgcaccagcgcgcacgtttgtggtaaacgccgacacgtcggtcccacgtcgatagaccccacccaccagtgagtagcgtgtacgtattcgggggtgacggacgtgtcgccgtcgtcttgctagtcccattcccatctgagccacacatctctgaacaaaaaaaaggagggaggcctccacgcacatccccctccgtgccacccgccccaaaccctcgcgccgcctccgagacagccgccgcaaccatggccaccgccgccgccgcgtctaccgcgctcactggcgccactaccgctgcgcccaaggcgaggcgccgggcgcacctcctggccacccgccgcgccctcgccgcgcccatcaggtgctcagcggcgtcacccgccatgccgatggctcccccggccaccccgctccggccgtggggccccaccgagccccgcaagggtgctgacatcctcgtcgagtccctcgagcgctgcggcgtccgcgacgtaagtttctgcttctacctttgatatatatataataattatcattaattagtagtaatataatatttcaaatatttttttcaaaataaaagaatgtagtatatagcaattgcttttctgtagtttataacttcgtatagcatacattatacgaagttatacttttctaatatatgaccaaaatttgttaccgaattcaggcgacccatcgctgctttgtctacatcatgttcttcatcatcctccccaggcgacgcgtgctgctgttcttattcagactaccgttcgagtgactgcatggcgtacatctttctgcatcgactttgtacggctacatcgaacatatacacgagatgtctcgtgtgaatagagtcactaatgccttaagcatcggttactccgtagggtacattctgttcttcttatttgtgcatatttttattgttgtttactgattatacgagtagttatacatacatgcacatacatatcatcacatatatcacaatatttttctaaattaaattaaaactaaaaatgactaaatttctaacaccaacgacattgtaatgttttctccaacaactttacctattctacattgttctatttcgaatttcactctataaacaacatagtctacaatggaaaacagtgctttgtacgactatatacgcgatgtgtggctacaacataagacaatatagtcgtttgaagattgaacctatatatcggtacggttaatccgtctatgtacgtgggcatgacgaacacccgtgataacgaaggattaacgtgcacaatcataaatccaaagtaggagcggtgcatgatgagaatcgctctcagtactcgacataatgaaccttacgaggtacaacaggcaggcaggcagggaccaggggccgcctttatttcaggctcgctggccccacgggcgtgctgcgtgcacgaagggcactaccccaacctctcaccgaaaaccgcgctggatcggcaaatcaaacgaggtggtgccccgtgcccactctccacgtccacggcaccatccctctgcagccgctcaccagccatgccgtgtcgcggaacggcacaaccacccccaacccactcacgaaaccccgtcccggccgtgcccgtgtcggtccgcgctcggcaacgaggcggcccgcgctgctgagtcccctggacacccgacaccctgtcggccctttgtttattcatcccgaaatctcatctgcccccacggccgactgcgctgcgccgcccggatatatatacccatcgttatcgatcgactggggactctatcagtgatagagtctagaggatcgctcaggaaggccgctgagatagaggcatggcggccaatgcgggcggcggtggagcgggaggaggcagcggcagcggcagcgtggctgcgccggcggtgtgccgccccagcggctcgcggtggacgccgacgccggagcagatcaggatgctgaaggagctctactacggctgcggcatccggtcgcccagctcggagcagatccagcgcatcaccgccatgctgcggcagcacggcaagatcgagggcaagaacgtcttctactggttccagaaccacaaggcccgcgagcgccagaagcgccgcctcaccagcctcgacgtcaacgtgcccgccgccggcgcggccgacgccaccaccagccaactcggcgtcctctcgctgtcgtcgccgccgccttcaggcgcggcgcctccctcgcccaccctcggcttctacgccgccggcaatggcggcggatcggctgtgctgctggacacgagttccgactggggcagcagcggcgctgccatggccaccgagacatgcttcctgcaggactacatgggcgtgacggacacgggcagctcgtcgcagtggccacgcttctcgtcgtcggacacgataatggcggcggccgcggcgcgggcggcgacgacgcgggcgcccgagacgctccctctcttcccgacctgcggcgacgacggcggcagcggtagcagcagctacttgccgttctggggtgccgcgtccacaactgccggcgccacttcttccgttgcgatccagcagcaacaccagctgcaggagcagtacagcttttacagcaacagcaacagcacccagctggccggcaccggcaaccaagacgtatcggcaacagcagcagcagccgccgccctggagctgagcctcagctcatggtgctccccttaccctgctgcagggagtatgtgagagcaacgcgagctgccactgctcttcactggtaccgttaacagatcattcgacaaagcagcattagtccgttgatcggtggaagaccactcgtcagtgttgagttgaatgtttgatcaataaaatacggcaatgctgtaagggttgttttttatgccattgataatacactgtactgttcagttgttgaactctatttcttagccatgccaagtgcttttcttattttgaataacattacagcaaaaagttgaaagacaaaaaaaaaaacccccgaacagagtgctttgggtcccaagcttctttagactgtgttcggcgttccccctaaatttctccccctatatctcactcacttgtcacatcagcgttctctttccccctatatctccacgctctacagcagttccacctatatcaaacctctataccccaccacaacaatattatatactttcatcttcaactaactcatgtaccttccaatttttttctactaataattatttacgtgcacagaaacttagcaaggagagagagagcggggtgacccaccttgctagttggatattacctcttctcttcaaagtatccttgaacgctcaccggttatcaaatctctacactatagctctgtagtcttgctagatagttagttctttagctctcggtgaccaagcttggcgcgatcaagcttatcgataccgtcgacctcgaagcttggtcacccggtccgggcctagaaggccagcttcaagtttgtacaaaaaagcaggctccggccagaatggcccggaccgggttaccgaattcttaccctagctccctgcggctgttacgcggtcccccatcaatcttctgttcttgcggttgtagcctgtgtaacagtgctagagtatgtatgataaataggttttaagtctgcttacatgacattttttattgtggaagagacatataaaaattagagagagtggttctcatgcaacggcggacggcccggtgctaaaagagcttcaagacaaaataatgaaacaggaagagagtagatttatctaagagccaactttattatatgaatgtgtttattgttggctttagatgatatggtaaggagttagagctaataatagataggctctattattattattattaattaaactcgctctaaggaggaaagtgggaggaagggacgaggacgaagactactggaagcatcgtgcatggatgatggatgtggtgtctcttaatgtaggtggccggaggatgtacgtgttaattgcgcgataagcactcagatccaaccgcaaactacctccacactgacacactgatagagagaaagagagacctccgacgactgccgccgcagatgagccacgtacgtatacgacgtctgccggccggctcaggctgccgccatcaccctgctcgaaagtcgcgttaggcggcgccagctacataggagtatctagtctagccagttagtatactactactgcgctgatgatgaattaactctgcatagatactgtacttgcctccctccaacacccaaccacctcctgctcggctcttaataacttggacacggatcgatgccatccaaggaagaacacgacgacgacgacggaacatccaccatgcaagcttgcatccatacgccgatacgcgtgcatccatccatccaccattatttccattttccaccgatcacacgtacacaggcctatttaaggagcgacatcccactgcaactctcctcaccactcatcaccagctagctctagcaaagcacttgccatctaccgaccgccgcattccaaacagcccgacgagctagcagagcggcaggcacctccctcctcaaggaacccatggccactgtgaacaactggctcgctttctccctctccccgcaggagctgccgccctcccagacgacggactccacactcatctcggccgccaccgccgaccatgtctccggcgatgtctgcttcaacatcccccaagattggagcatgaggggatcagagctttcggcgctcgtcgcggagccgaagctggaggacttcctcggcggcatctccttctccgagcagcatcacaaggccaactgcaacatgatacccagcactagcagcacagtttgctacgcgagctcaggtgctagcaccggctaccatcaccagctgtaccaccagcccaccagctcagcgctccacttcgcggactccgtaatggtggcttcctcggccggtgtccacgacggcggtgccatgctcagcgcggccgccgctaacggtgtcgctggcgctgccagtgccaacggcggcggcatcgggctgtccatgattaagaactggctgcggagccaaccggcgcccatgcagccgagggtggcggcggctgagggcgcgcaggggctctctttgtccatgaacatggcggggacgacccaaggcgctgctggcatgccacttctcgctggagagcgcgcacgggcgcccgagagtgtatcgacgtcagcacagggtggagccgtcgtcgtcacggcgccgaaggaggatagcggtggcagcggtgttgccggcgctctagtagccgtgagcacggacacgggtggcagcggcggcgcgtcggctgacaacacggcaaggaagacggtggacacgttcgggcagcgcacgtcgatttaccgtggcgtgacaaggcatagatggactgggagatatgaggcacatctttgggataacagttgcagaagggaagggcaaactcgtaagggtcgtcaagtctatttaggtggctatgataaagaggagaaagctgctagggcttatgatcttgctgctctgaagtactggggtgccacaacaacaacaaattttccagtgagtaactacgaaaaggagctcgaggacatgaagcacatgacaaggcaggagtttgtagcgtctctgagaaggaagagcagtggtttctccagaggtgcatccatttacaggggagtgactaggcatcaccaacatggaagatggcaagcacggattggacgagttgcagggaacaaggatctttacttgggcaccttcagcacccaggaggaggcagcggaggcgtacgacatcgcggcgatcaagttccgcggcctcaacgccgtcaccaacttcgacatgagccgctacgacgtgaagagcatcctggacagcagcgccctccccatcggcagcgccgccaagcgcctcaaggaggccgaggccgcagcgtccgcgcagcaccaccacgccggcgtggtgagctacgacgtcggccgcatcgcctcgcagctcggcgacggcggagccctggcggcggcgtacggcgcgcactaccacggcgccgcctggccgaccatcgcgttccagccgggcgccgccagcacaggcctgtaccacccgtacgcgcagcagccaatgcgcggcggcgggtggtgcaagcaggagcaggaccacgcggtgatcgcggccgcgcacagcctgcaggacctccaccacctgaacctgggcgcggccggcgcgcacgactttttctcggcagggcagcaggccgccgccgctgcgatgcacggcctgggtagcatcgacagtgcgtcgctcgagcacagcaccggctccaactccgtcgtctacaacggcggggtcggcgacagcaacggcgccagcgccgtcggcggcagtggcggtggctacatgatgccgatgagcgctgccggagcaaccactacatcggcaatggtgagccacgagcaggtgcatgcacgggcctacgacgaagccaagcaggctgctcagatggggtacgagagctacctggtgaacgcggagaacaatggtggcggaaggatgtctgcatgggggactgtcgtgtctgcagccgcggcggcagcagcaagcagcaacgacaacatggccgccgacgtcgggcatggcggcgcgcagctcttcagtgtctggaacgacacttaagcgtacctagtggtacctgacatcttatagtctgcaacctctcgtgtctgaattcctatctttatcaagtgttattgcttccacgactataggacagctttcgtcgaaagcttttgctcatgtgatctcgaaggattcatctagtctgatttttcgtgacttgtatcggttttattggattcatccaacatatatcaataaaaaatgagttgtgtttcctttcttcctagttcagttaaaattatttccctcctgcgcttgtgctgtaattgtctgtgtacctgttgtttgtgactgtgttagttcccttggatatgatttcgtatttgatatgtacatggagatagcttagcttcattattggagtatgaagttagtatgacatagtcactctcctggaaaattgacactgcaaaccatatttttattctgaaccacaaatcctagtcagtccgctggcatatgccgtccgtttgctgaatccagaacgtgggtttggagatgtacggctgagatgcctctatgcgaaggggatttcgtggtgaaacgagatgggagtagagcaacgcccgtggaagatgcttcaaacttccacacttttgagcaacgatcggcagtagtaaggtagacgatttcaagatcaaagcatatgaagataaacaacatcaacaacaaaatttgttggggttctatagagagaaacagagctacatacatacactgttttgtatctaccatctgagatgatgaaaagatgaaaaactaaagaatgccccggcgccaacgccaggacacgccgcgcgcgcgtcacccgagccatctcttgacccagccggcgctgtatatttacacacgttgcagcatcgatcaccacctgttcgatcgcgtcgccgtcaccgggatctgagtcgaaacctagacttgtccatcttctggattggccaacttaattaatgtatgaaataaaaggatgcacacatagtgacatgctaatcactataatgtgggcatcaaagttgtgtgttatgtgtaattactagttatctgaataaaagagaaagagatcatccatatttcttatcctaaatgaatgtcacgtgtctttataattctttgatgaaccagatgcatttcattaaccaaatccatatacatataaatattaatcatatataattaatatcaattgggttagcaaaacaaatctagtctaggtgtgttttgcgaatgcgaccttcttatgtgcttctagtctccaaatgtggttgatagttattttgctctaagatcaacagtaatgaagtataaatcatcgttgtggtgtgctactcggttaattgagcattaacacacacaaacatgacgaggatggtataatctccaaaaatgtgtactttgttaggtgggaccctatagccttgattaatgtgctatgttaggcatgcctggaaacgtgtgacgcatatgttttgtgaacctgttgatattatatgtgcttttatattaccatattttattaaaatactaatatttattactagtaagatataacattctatctagcttaaaaactaaccataaatattccataataactagatttaccaaactaatatactaaatatacataataaatacaaaattaacaagacaataatcaatatttatgagcttaatatatttagacattatggttggtcgacgataatcatgctaacttttcgtaattgcttgattgaaatatgcttagaataatgcctctttgttctacatggcaaatagggaccattatggtgtaacaccctgggaaccacaaacaccccgaaatgctactaaactacacaactaaccttcatatataaaatttcgacagcatctcctttgaaaatttgcatagacgtggaagcaacagagtataaacagatatcatgataagaaaacatactagacattaataatctgctagaaatgggaagaatcctaacttgacgactgcgtaactgactagagtcacacttagctgaccctagtcacttacaactgacttcgtgtcctagatcgatgggccctggccgaagcttggtcacccggtccgggcctagaaggccagcttcaagtttgtaccctggagcttgccgagtgccatccttggacactcgataaagtatattttattttttttattttgccaaccaaactttttgtggtatgttcctacactatgtagatctacatgtaccattttggcacaattacatatttacaaaaatgttttctataaatattagatttagttcgtttatttgaatttcttcggaaaattcacatttaaactgcaagtcactcgaaacatggaaaaccgtgcatgcaaaataaatgatatgcatgttatctagcacaagttacgaccgatttcagaagcagaccagaatcttcaagcaccatgctcactaaacatgaccgtgaacttgttatctagttgtttaaaaattgtataaaacacaaataaagtcagaaattaatgaaacttgtccacatgtcatgatatcatatatagaggttgtgataaaaatttgataatgtttcggtaaagttgtgacgtactatgtgtagaaacctaagtgacctacacataaaatcatagagtttcaatgtagttcactcgacaaagactttgtcaagtgtccgataaaaagtactcgacaaagaagccgttgtcgatgtactgttcgtcgagatctctttgtcgagtgtcacactaggcaaagtctttacggagtgtttttcaggctttgacactcggcaaagcgctcgattccagtagtgacagtaatttgcatcaaaaatagctgagagatttaggccccgtttcaatctcacgggataaagtttagcttcctgctaaactttagctatatgaattgaagtgctaaagtttagtttcaattaccaccattagctctcctgtttagattacaaatggctaaaagtagctaaaaaatagctgctaaagtttatctcgcgagattgaaacagggccttaaaatgagtcaactaatagaccaactaattattagctattagtcgttagcttctttaatctaagctaaaaccaactaatagcttatttgttgaattacaattagctcaacggaattctctgtttttctaaaaaaaaactgcccctctcttacagcaaattgtccgctgcccgtcgtccagatacaatgaacgtacctagtaggaactcttttacacgctcggtcgctcgccgcggatcggagtccccggaacacgacaccactgtggaacacgacaaagtctgctcagaggcggccacaccctggcgtgcaccgagccggagcccggataagcacggtaaggagagtacggcgggacgtggcgacccgtgtgtctgctgccacgcagccttcctccacgtagccgcgcggccgcgccacgtaccagggcccggcgctggtataaatgcgcgccacctccgctttagttctgcatacagccaacccaaggatgtccaacctgctcacggttcaccagaaccttccggctcttccagtggacgcgacgtccgatgaagtcaggaagaacctcatggacatgttccgcgacaggcaagcgttcagcgagcacacctggaagatgctgctctccgtctgccgctcctgggctgcatggtgcaagctgaacaacaggaagtggttccccgctgagcccgaggacgtgagggattaccttctgtacctgcaagcgcgaggtttgtttctgcttctacctttgatatatatataataattatcattaattagtagtaatataatatttcaaatatttttttcaaaataaaagaatgtagtatatagcaattgcttttctgtagtttataagtgtgtatattttaatttataacttttctaatatatgaccaaaacatggtgatgcctaggtctggcagtgaagaccatccagcaacaccttggacaactgaacatgcttcacaggcgctccggcctcccgcgccccagcgactcgaacgccgtgagcctcgtcatgcgccgcatcaggaaggaaaacgtcgatgccggcgaaagggcaaagcaggccctcgcgttcgagaggaccgatttcgaccaggtccgcagcctgatggagaacagcgacaggtgccaggacattaggaacctggcgttcctcggaattgcatacaacacgctcctcaggatcgcggaaattgcccgcattcgcgtgaaggacattagccgcaccgacggcggcaggatgcttatccacattggcaggaccaagacgctcgtttccaccgcaggcgtcgaaaaggccctcagcctcggagtgaccaagctcgtcgaacgctggatctccgtgtccggcgtcgcggacgacccaaacaactacctcttctgccgcgtccgcaagaacggggtggctgcccctagcgccaccagccaactcagcacgagggccttggaaggtattttcgaggccacccaccgcctgatctacggcgcgaaggatgacagcggtcaacgctacctcgcatggtccgggcactccgcccgcgttggagctgctagggacatggcccgcgccggtgtttccatccccgaaatcatgcaggcgggtggatggacgaacgtgaacattgtcatgaactacattcgcaaccttgacagcgagacgggcgcaatggttcgcctcctggaagatggtgactgagctagacccagctttcttgtacaaagtggccgttaacggatccagacttgtccatcttctggattggccaacttaattaatgtatgaaataaaaggatgcacacatagtgacatgctaatcactataatgtgggcatcaaagttgtgtgttatgtgtaattactagttatctgaataaaagagaaagagatcatccatatttcttatcctaaatgaatgtcacgtgtctttataattctttgatgaaccagatgcatttcattaaccaaatccatatacatataaatattaatcatatataattaatatcaattgggttagcaaaacaaatctagtctaggtgtgttttgcgaattgcggcaagctgttaccgaattcctgcccttaaggccaattgttcaagattcattcaacaattgaaacatctcccatgattaaatcagtataaggttgctatggtcttgcttgacaaagtttttttttgagggaatttcaactaaatttttgagtgaaactatcaaatactgattttaaaaaatttttataaaaggaagcgcagagataaaaggccatctatgctacaaaagtacccaaaaatgtaatcctaaagtatgaattgcattttttttttgtttggacgaaaggaaaggagtattaccacaagaatgatatcatcttcatatttagatcttttttgggtaaagcttgagattctctaaatatagagaaatcagaagaaaaaaaaaccgtgttttggtggttttgatttctagcctccacaataactttgacggcgtcgacaagtctaacggacaccaagcagcgaaccaccagcgccgagccaagcgaagcagacggccgagacgttgacaccttcggcgcggcatctctcgagagttccgctccggcgctccacctccaccgctggcggtttcttattccgttccgttccgcctcctgctctgctcctctccacaccacacggcacgaaaccgttacggcaccggcagcacccagcacgggagaggggattcctttcccaccgttccttccctttccgccccgccgctataaatagccagccccatccccagcttttttccccaatctcatctcctctctcctgttgttcggagcacacgcacaatccgatcgatccccaaatccccttcgtctctcctcgcgagcctcgtggatcccagcttcaaggtacggcgatcgatcatcccccctccttctctctaccttcttttctctagactacatcggatggcgatccatggttagggcctgctagtttcccttcctgttttgtcgatggctgcgaggcacaatagatctgatggcgttatgacggctaacttgtcatgttgttgcgatttatagtccctttaggagatcagtttaatttctcggatggttcgagatcggtggtccatggttagtaccctaagatccgcgctgttagggttcgtagatggaggcgacctgttctgattgttaacttgtcagtacctgggaaatcctgggatggttctagctcgtccgcagatgagatcgatttcatgatcctctgtatcttgtttcgttgcctaggttccgtctaatctatccgtggtatgatgtagatgttttgatcgtgctaactacgtcttgtaaagttaattgtcaggtcataatttttagcatgcctttttttttgtttggttttgtctaattgggctgtcgttctagatcagagtagaagactgttccaaactacctgctggatttattgaacttggatctgtatgtgtgtcacatatcttcataaattcatgattaagatggattgaaatatcttttatctttttggtatggatagttctatatgttggtgtggctttgttagatgtatacatgcttagatacatgaagcaacgtgctgctactgtttagtaattgctgttcatttgtctaataaacagataaggatatgtatttatgttgctgttggttttgctggtactttgttggatacaaatgcttcaatacagaaaacagcatgctgctacgatttaccatttatctaatcttatcatatgtctaatctaataaacaaacatgcttttaaattatcttcatatgcttggatgatggcatacacagcggctatgtgtggttttttaaatacccagcatcatgggcatgcatgacactgctttaatatgctttttatttgcttgagactgtttcttttgtttatactgaccctttagttcggtgactcttctgcaggtcgactttaacttagcctaggatccatggcccagtccaagcacggcctgaccaaggagatgaccatgaagtaccgcatggagggctgcgtggacggccacaagttcgtgatcaccggcgagggcatcggctaccccttcaagggcaagcaggccatcaacctgtgcgtggtggagggcggccccttgcccttcgccgaggacatcttgtccgccgccttcatgtacggcaaccgcgtgttcaccgagtacccccaggacatcgtcgactacttcaagaactcctgccccgccggctacacctgggaccgctccttcctgttcgaggacggcgccgtgtgcatctgcaacgccgacatcaccgtgagcgtggaggagaactgcatgtaccacgagtccaagttctacggcgtgaacttccccgccgacggccccgtgatgaagaagatgaccgacaactgggagccctcctgcgagaagatcatccccgtgcccaagcagggcatcttgaagggcgacgtgagcatgtacctgctgctgaaggacggtggccgcttgcgctgccagttcgacaccgtgtacaaggccaagtccgtgccccgcaagatgcccgactggcacttcatccagcacaagctgacccgcgaggaccgcagcgacgccaagaaccagaagtggcacctgaccgagcacgccatcgcctccggctccgccttgccctccggactcagatctcgatagggtaccaatggccagttaacagatccagctgctgctgttctagggttcacaagtctgcctatttgtcttccccaatggagctatggttgtctggtctggtccttggtcgtgtcccgtttcattgtgtactatttacctgtaatgtgtatccttaagtctggtttgatggtgtctgaaacgttttgctgtggtagagcagcatggaagaactataatgaataagtgatccctaatcattgtgtccaaattttgcttctgctatacccttttgtgctgtttcttatgttttgcttaaaaatttgatctgacaaacaaatttgtctaaattatgctcttgttctgactgtgtactgtacacatttgtattgctaccggtttggcacatagttttctctttgattgcagatcaaacccttctgattgcagattgcttggctatggctgatgtgctcactgttcttctttagcttgtatattgctgatggtggcttggctacggctgaaaaagttgctgctgcgccgacttggcaactgttgctccagtaatgctttgtcctctcttcctagccgccgacttggcacttggcagctgttgctcctgtaatgcgttgttatctcttatctcttgagatgtactatgattttgaggctgtttgacttgtgccagattgccagtgctgatgctatattatctcaggtttttatgctagtatatgttttactgtgtgctgcctgtgtcgagttacgtaatctattgaaccgctatgcgtgttgatgccctgttgttgcttgccagattgatgcccctgttgcttgcagcttgcaagctgtagtgaaatcctaaaattcgaaaccaaatctattctgaacttttgaagatctgtgatgtccggaagaaaagattcaaacagataaacgggactctccagaatctataaaataaatgatcgacaaacgctttgctttggtaggcttcctagttagttagcggaccgaagcttcggtccgggcctagaaggccagcttcggccgccccatttcaaatatttttttcaaaataaaagaatgtagtatatagcaattgcttttctgtagtttataacttcgtatagcatacattatacgaagttatacttttctaatatatgaccaaaatttgttgatgtgcaggtcttcgcctaccccggcggcgcgtccatggagatccaccaggcactcacccgctcccccgtcatcgccaaccacctcttccgccacgagcaaggggaggcctttgccgcctccggctacgcgcgctcctcgggccgcgtcggcgtctgcatcgccacctccggccccggcgccaccaacctagtctccgcgctcgccgacgcgctgctcgattccgtccccatggtcgccatcacgggacaggtggcgcgacgcatgattggcaccgacgccttccaggagacgcccatcgtcgaggtcacccgctccatcaccaagcacaactacctggtcctcgacgtcgacgacatcccccgcgtcgtgcaggaggctttcttcctcgcctcctctggtcgaccagggccggtgcttgtcgacatccccaaggacatccagcagcagatggcggtgcctgtctgggacaagcccatgagtctgcctgggtacattgcgcgccttcccaagccccctgcgactgagttgcttgagcaggtgctgcgtcttgttggtgaatcgcggcgccctgttctttatgtgggcggtggctgcgcagcatctggtgaggagttgcgacgctttgtggagctgactggaatcccggtcacaactactcttatgggcctcggcaacttccccagcgacgacccactgtctctgcgcatgctaggtatgcatgggacggtgtatgcaaattatgcagtggataaggccgatctgttgcttgcacttggtgtgcggtttgatgatcgcgtgacagggaagattgaggcttttgcaagcagggctaagattgtgcacgttgatattgatccggctgagattggcaagaacaagcagccacatgtgtccatctgtgcagatgttaagcttgctttgcagggcatgaatgctcttcttgaaggaagcacatcaaagaagagctttgactttggctcatggaacgatgagttggatcagcagaagagggaattcccccttgggtataaaacatctaatgaggagatccagccacaatatgctattcaggttcttgatgagctgacgaaaggcgaggccatcatcggcacaggtgttgggcagcaccagatgtgggcggcacagtactacacttacaagcggccaaggcagtggttgtcttcagctggtcttggggctatgggatttggtttgccggctgctgctggtgcttctgtggcaaacccaggtgtcactgttgttgacatcgatggagatggtagctttctcatgaacgttcaggagctagctatgatccgaattgagaacctcccagtgaaggtctttgtgctaaacaaccagcacctggggatggtggtgcagttggaggacaggttctataaggccaacagagcgcacacatacttgggaaacccagagaatgaaagtgagatatatccagatttcgtgacgatcgccaaagggttcaacattccagcggtccgtgtgacaaagaagaacgaagtccgcgcagcgataaagaagatgctcgagactccagggccgtacctcttggatataatcgtcccacaccaggagcatgtgttgcctatgatccctagtggtggggctttcaaggatatgatcctggatggtgatggcaggactgtgtactgatgactagctagtcagttaacagatctgccagatcctcggtgtacaaataacccgtcttatcctatgagacgggccggcgtcagtgtgttctggaggaatttttatgtcagagcctttttctttgtgtgcttgatgtagatgccaagggaagcttattggctgttgaagcttgatgcaaaataaattatggaactctgttttttgtttatctaataataactagcaaatatgcttccattgcattgaaactaacagccttttgtgtttccaagttttattttgtgacaatgtcatctatttcaattagttgtggaatcggaaacttgcaggactaacttggaaactccaatccctcagcatcctggactttttcctggtgtaatccatgtagatattattttaatcatcattttagttctggaggtttttccatctccggttttgctcccctttcttcaaaaaaaaaaaaaaaatgccgtaggcgccgcaacgcccacctgttgttcaaactcatgggcacgagtggctcgaagattttatacaacaattgctgtagtttcaccgttgctggtgaagaagcatttttttaaaaaaatatagtggtattcattttaattagtttagttgtgcagcgagcaaaatttggacatgctctgctcggaatctgatcgacctagacacagattagcagcagtagctttgtcatctgttccaagagttgcgatctgatagaagaaaaaaaaaccttcccttcaatgtaaaaccgaaactaacaagaaagaagcacagtgccgtttaggcaagtatggagtacgtattaagcatgtagaaggccatgcatgaaccactaacaagaaagaagcgcagtgccattcaggcaagcataagcatgtagattggcatgcatgaacaactaacagtagatcgtctctggtctgattagaagttttttgggaagccaagaaatcatgtacaactggttccatctcaaattccgtggcaaaaagaggcctaagcaacataaagctttccactggttgccatatatgatttgggcatttcactttgatcttaatgggccttgtaaagcccaagactcatgattatctttagttgatgctcttaattaggtgtgggcaaataattcaaactgtatgtacccgaccaaaaccaaagcaaaaataatcgaaccaaaccgaaaatttaaaaataaccgaatgaaaactaaatcctataactgaaagaactgaaaccgaatcaaaatatttaatgtaaccaaaaatatccgaaatataattatattgtcaaaaatattaataatttctagattaaataattaaaaatacttaaaaatttatataaaatagtaaaaatactcgaaaataaccacaaatattcaaaaacaaccgaaatatcccaaaatattcaaagcaaaataaccgaatggataccaaattttaaaaccgaaaaaactggaacaaaaccaaaatcgaaccaaaatttcaaaaatcgaataaatactaaactttagaacaaaaaaaaacgataaccgaatgtatacgaaccaaagccgaattagataaccgaacgtccaggactactcttaatctttccgccacttatgatttgggctattactttgtttataatgagccttttcaagctcaagttcatgattgtccgtgagatgagaaactgacttgttggattcgaaaccctagctagtattggttaatacttaatacataaatgacctgcattgacatcatcatccaagaaaataaaaattgtatgcttgagatatttagttttcctagctaggttttctttattttagtaccgaatctttaggtgtgccacgttaatttagacccattttttcatacttaccaactgagtctagtttaatcatgactataatcgtataaaatgattcagtcgacgtcattgcgaacgtatataaaatcatccaaattgacgtcattccaaagaggtaagcatgcttatctaagagtccgagcatactaaacaagacgacattttatttgcactccaaatcaaattttgtattgcctaaagaaaaacaatcaaactcaagtttcttaaaattaatttcattcaaactaatcactttcaatatctcacatattattcatgccatttctatttgtctaaacatgatttaaaaaaaaaagtaaaatacaaagattactatgcaaaaactctataaaaaaaaattcaaatttcttatttatttgtgacatcaaattttcaaaataatttttttaattatcggttgatccggtcagtcgataaaaacataaactttcagcgaccgttaaaactttcctactaccgatttagagaaaatcttagcttgaaacgtaattgtaacctgccttcatgcaagtcgcaagatatgtcatcctaagttgtatatgttttctcaaaagatgtatttacttgagaaaatacgtttcaacgttgatggacaaccaattaagaatcaagcacctttcgtaatcaatttaggcttatcgtctaaggtatactgatttacgacagttgactagacttataaggaacaaaataatagaatagtttctaaacacttcacctaatcatagagactaagatggtaattcgtaaacgacaaagcctagtgacactgtccattgtaaaattccacatcatattagtattaaacatatacatgtagtttcctgaacacatgtagtatcaaacacacttcgtggcttcttcctcgaaacctgcggccgctcattaattaagtcatctagttgaaggatcgctatcaactttgtatagaaaagttgggccgaattcgagctcggtacggccagaatggcccggaccgaagcttaccggtttgatcatttgttcatctcacatgatagttctaacaatatgcacaaattctatacatatctctcgtagttccataaactacgagagagatataggttttatgaacaaatttatttttagtttatcatatgaagaaatgttcaaaatataaaatgtacatcatgatgagttatacaaatttgtagttgaaaactttttcatttgaattaatttactgctttaaaatgtgtatgcagttggcttgatgtgagacaataagctaaaccacgggttttccatgggtttccacccaattacgggttggtttgggatcaataatgttattggatgggttgggtttaactttcctctagtatttttggttgggtgtgggatggatatcaaagtaattagatttgggtatgggtgggagcggattggattttttgccattagcaggcctatgcacttgtcggcgcacacggctggcgcgtgcacacaccttatcggcagacgccgccgctgctgctgctgatgcttcttcttcttccaccgattgattgagatccaaggaaatgctgggcgcgtttttaaactggctgatcggcttcgtcccatgatctgagatttccttttcagactgttgtatatgtagcggcgacatggataggatatgtatggaccgttttaattaatactaaatatcaatggtttaactcttcactattactcctagctagatgtgaaagctcgccctggaatgcacatgaacaactacaccgagttgggcagtttggcaatgcatgcagttcaagagccacgccggttaacccttcactttgtagttattgcctgcattttgtaaatttggtgtgaacttaattctaatctgtaattctgtatagagaatggtgcatgtactgaactcctgactgatcaaaacgtggggtccactttcctcgccgaaaaagaaaagagaaaaaaaggtttattgtccactttattaaaaactggacttatatatatgcttggaacaaatacttagggggtgtttggttttaggaatctctcaatctaaaataaggtggtgtatcataggtttattactcaaatttggtgggatgatctcattgctcatattagtactaactaactaactatgaggaatgagatggtgatggatcaacccattacattctacaaaccaaacaaaaaagtgaggagtgagaagatggtgaactagctcatttctcaaaccaaacactctattaataaaccaatcgcgtagctaataaatatatgtaacctcgacattctagctacagcttgtggttggtagaaaagcaaatcatgctcaaaataatgtgctccgaaacttcattacatttttcttcacttgagtgtacatacattttttttcccttggccctcttatccttaactaagaagcataaaacgggatttctcagccagttcttagcttctcttataaatacagaccttgtacaacactttcacctcctctcaggtggccaggatattttttctggccccttcctgccctcttcacactgacccatgtgttgttctatccctggaaagctatacctccttacccctatcagcttctcctcacatctcctctcgtcgccacccatgctatcaccgctctgatcacaagcaaggcaaaccctcactgttctatcaacgcccctcccttagctagcctaggcgcgccatttaaatatggatcaccaccgcacgccgatggagaactcggcgtcctcgaagccgccgacgccggcgtccacgcccaactcgcgcctcgcatcggcgccgtcaccccgccactccgccacgccgccgcacgcgtccgcgccggcgtccgccccggcgccggcctcgcgcaccgtctacagcgaccgcttcatccccagccgcgccggatccaacctcgcgctcttcgacctcggcccctcgccctcgcccgccgccgccgccgcctcctcgtcctcctcccacgaggccggccccgcggcctcgtccggatctgcgcccgccgcggcgtcgccctactgcgcgctcctccgcgccgcgctcttcgggcccgacacgcccgaccgggtcgcgtcctcggccgccgcgtgctcgtcctcctcctcctccccggggctctcgcctgtgggcacccccgccaccgggaacatcttcagattcaagacggaggtgcgccggaacgccaagagggcgcttttttccggaggggaggaggaggaggacgccctgttccccggcattttcaccaccaggggcgcgggaccaaggaaggtcccgaggtcgccctacaaggtgctggatgcgcctgcgttgcaggacgacttctacctcaacctcgtcgattggtcttcacataacgtcctcgctgttgggttgggcaattgcgtttacctgtggaatgcatgcagcagcaaggtcaccaagctttgcgatttgggggtggatgacaacgtttgttctgtggggtgggcgcagcgcggcactcaccttgcagtaggaacaaatcaaggaaaagttcagatctgggatgcaactcgctgtaaaagaataaggacaatggaaagccatcgcatgcgtgtaggtgctcttgcatggagttcttcgttgctttcttctggaagccgtgacaagagcatcctccaccatgatatccgtgctcaagaagatcatgttagcaagcttaccgggcataaatctgaggtttgtggactcaagtggtcttatgacaatcgtcagcttgcatcgggtggcaatgacaacagactttttgtttggaatccacattcagtacagccagtactgaagtatactgagcacacagcagctgtcaaagctattgcctggtcacctcatctccatgggctgcttgcatctggtggaggaactgcagatagatgcatacgattttggaatacgaccacaaatgcacacttgagctgtgtggacactggcagccaggtctgcaatctcgcgtggtcaaagaatgtaaatgagcttgttagcacccacggctactctcagaaccaaataattgtttggagatatccaacaatgtcgaagcttgccactttgacagggcatacatacagagtattgtacttagctatttcccctgatggccagaccatagttactggtgctggtgatgaaacgctccggttttggaacgtgttcccctctccaaagtcccagagttctgatagtttaagttgtgtcggaggaacatctttcgttagaagctacatccggtgaatttaaatgcccgggcgatcgctcgaggcgtacctagtggtaccacatggttaacctagacttgtccatcttctggattggccaacttaattaatgtatgaaataaaaggatgcacacatagtgacatgctaatcactataatgtgggcatcaaagttgtgtgttatgtgtaattactagttatctgaataaaagagaaagagatcatccatatttcttatcctaaatgaatgtcacgtgtctttataattctttgatgaaccagatgcatttcattaaccaaatccatatacatataaatattaatcatatataattaatatcaattgggttagcaaaacaaatctagtctaggtgtgttttgcgaatgcggccgccaccgcggtggagctcgaattccggtccgggcctagaaggccagcttcaagtttgtacaaaaaagcaggctccggccagaatggcccggaccgggttaccgaattcgagctcggtaccctgggatccgatatcgatgggccctggccgaagcttggtcacccggtccgggcctagaaggccgatctcccgggcacccagctttcttgtacaaagtggccgttaacggatcggccagaatggcccggaccgaagcttgcatgcctgcagtgcagcgtgacccggtcgtgcccctctctagagataatgagcattgcatgtctaagttataaaaaattaccacatattttttttgtcacacttgtttgaagtgcagtttatctatctttatacatatatttaaactttactctacgaataatataatctatagtactacaataatatcagtgttttagagaatcatataaatgaacagttagacatggtctaaaggacaattgagtattttgacaacaggactctacagttttatctttttagtgtgcatgtgttctcctttttttttgcaaatagcttcacctatataatacttcatccattttattagtacatccatttagggtttagggttaatggtttttatagactaatttttttagtacatctattttattctattttagcctctaaattaagaaaactaaaactctattttagtttttttatttaataatttagatataaaatagaataaaataaagtgactaaaaattaaacaaataccctttaagaaattaaaaaaactaaggaaacatttttcttgtttcgagtagataatgccagcctgttaaacgccgtcgacgagtctaacggacaccaaccagcgaaccagcagcgtcgcgtcgggccaagcgaagcagacggcacggcatctctgtcgctgcctctggacccctctcgagagttccgctccaccgttggacttgctccgctgtcggcatccagaaattgcgtggcggagcggcagacgtgagccggcacggcaggcggcctcctcctcctctcacggcaccggcagctacgggggattcctttcccaccgctccttcgctttcccttcctcgcccgccgtaataaatagacaccccctccacaccctctttccccaacctcgtgttgttcggagcgcacacacacacaaccagatctcccccaaatccacccgtcggcacctccgcttcaaggtacgccgctcgtcctcccccccccccctctctaccttctctagatcggcgttccggtccatgcatggttagggcccggtagttctacttctgttcatgtttgtgttagatccgtgtttgtgttagatccgtgctgctagcgttcgtacacggatgcgacctgtacgtcagacacgttctgattgctaacttgccagtgtttctctttggggaatcctgggatggctctagccgttccgcagacgggatcgatttcatgattttttttgtttcgttgcatagggtttggtttgcccttttcctttatttcaatatatgccgtgcacttgtttgtcgggtcatcttttcatgcttttttttgtcttggttgtgatgatgtggtctggttgggcggtcgttctagatcggagtagaattctgtttcaaactacctggtggatttattaattttggatctgtatgtgtgtgccatacatattcatagttacgaattgaagatgatggatggaaatatcgatctaggataggtatacatgttgatgcgggttttactgatgcatatacagagatgctttttgttcgcttggttgtgatgatgtggtgtggttgggcggtcgttcattcgttctagatcggagtagaatactgtttcaaactacctggtgtatttattaattttggaactgtatgtgtgtgtcatacatcttcatagttacgagtttaagatggatggaaatatcgatctaggataggtatacatgttgatgtgggttttactgatgcatatacatgatggcatatgcagcatctattcatatgctctaaccttgagtacctatctattataataaacaagtatgttttataattattttgatcttgatatacttggatgatggcatatgcagcagctatatgtggatttttttagccctgccttcatacgctatttatttgcttggtactgtttcttttgtcgatgctcaccctgttgtttggtgttacttctgcaggtcgactttaacttagcctaggatccatggcctcctccgagaacgtcatcaccgagttcatgcgcttcaaggtgcgcatggagggcaccgtgaacggccacgagttcgagatcgagggcgagggcgagggccgcccctacgagggccacaacaccgtgaagctgaaggtgaccaagggcggccccctgcccttcgcctgggacatcctgtccccccagttccagtacggctccaaggtgtacgtgaagcaccccgccgacatccccgactacaagaagctgtccttccccgagggcttcaagtgggagcgcgtgatgaacttcgaggacggcggcgtggcgaccgtgacccaggactcctccctgcaggacggctgcttcatctacaaggtgaagttcatcggcgtgaacttcccctccgacggccccgtgatgcagaagaagaccatgggctgggaggcctccaccgagcgcctgtacccccgcgacggcgtgctgaagggcgagacccacaaggccctgaagctgaaggacggcggccactacctggtggagttcaagtccatctacatggccaagaagcccgtgcagctgcccggctactactacgtggacgccaagctggacatcacctcccacaacgaggactacaccatcgtggagcagtacgagcgcaccgagggccgccaccacctgttcctgtagggtaccacatggttaacctagacttgtccatcttctggattggccaacttaattaatgtatgaaataaaaggatgcacacatagtgacatgctaatcactataatgtgggcatcaaagttgtgtgttatgtgtaattactagttatctgaataaaagagaaagagatcatccatatttcttatcctaaatgaatgtcacgtgtctttataattctttgatgaaccagatgcatttcattaaccaaatccatatacatataaatattaatcatatataattaatatcaattgggttagcaaaacaaatctagtctaggtgtgttttgcgaatgcggccgccaccgcggtggagctcgaattccggtccgggcctagaaggccagcttcggccgccccgggcaactttattatacaaagttgatagatcctcatgtcttcatcgtaagcttaaacaggccagaatggcctctggattcagcggcctagaaggccgaagtacttggtcttcctagtcgagtagatcacattcaagcttggtcacccggtccgtcaatattctgattccgatgacttcgtaggttcctagctcaagccgctcgtgtccaagcgtcacttacgattagctaatgattacggcatctaggaccgactagtggcgcgccgactagctagctaaggtaccgagctcgaattcattccgattaatcgtggcctcttgctcttcaggatgaagagctatgtttaaacgtgcaagcgctactagacaattcagtacattaaaaacgtccgcaatgtgttattaagttgtctaagcgtcaatttgtttacaccacaatatatcctgcca

SEQ ID NO: 32 - DNA, 27990 bp, Artificial Sequence
  RX000004
gtttacccgccaatatatcctgtcaaacactgatagtttaaactgaaggcgggaaacgacaatctgatcatgagcggagaattaagggagtcacgttatgacccccgccgatgacgcgggacaagccgttttacgtttggaactgacagaaccgcaacgttgaaggagccactcagcaagctggtacgattgtaatacgactcactatagggcgaattgagcgctgtttaaacgctcttcaactggaagagcggttacgctgtttaaacgctcttcaactggaagagcggttactaccggttcactagctagctgctaatcgagctagttaccctatgaggtgacatgaagcgctcacggttactatgacggttagcttcacgactgttggtggcagtagcgtacgacttagctatagttccggacttacccttaagcgatttaaatctgcggttaccgaattcgagctcggtaccctgggatctgcccttactttaacgcctctaaccaacacccctttatctttataaggaacaataaacagaatttgccccactgttctaaatcacctaataatatccccagctaaaaacaataaaggtttcctagaattaagacaagcatgactgttcctccaggagggtttggaacattgttgcagtcttgcagatacgggcgaagggtgagaaacagagcggagggctggaggtgacctcggtagtcgacgccggagttgagcttgacaacgacggggcggcccctgatggacttgaggaagtccgatggcgtcttcaccgtcccgccggcgcccgaggcgggcctgtcgctgccgccgccgccgctgctcatcttgcgcgctgtgcccccggcggtgtccctgtgttgcggatcgcgggtgggccaggtggatgcgagggcgacccgtttggactccggccggagccgccggatccctggtcggtgtcagtgccgtttactctgggccccacgtgtcagtaccgtctgtagatgacaacaacccgtcgtccacagtcatgtccaaaatatcctttcttcttttttttcgattcggatatctatcttccttttttttttccaaaaatcttcttgacgcaccagcgcgcacgtttgtggtaaacgccgacacgtcggtcccacgtcgatagaccccacccaccagtgagtagcgtgtacgtattcgggggtgacggacgtgtcgccgtcgtcttgctagtcccattcccatctgagccacacatctctgaacaaaaaaaaggagggaggcctccacgcacatccccctccgtgccacccgccccaaaccctcgcgccgcctccgagacagccgccgcaaccatggccaccgccgccgccgcgtctaccgcgctcactggcgccactaccgctgcgcccaaggcgaggcgccgggcgcacctcctggccacccgccgcgccctcgccgcgcccatcaggtgctcagcggcgtcacccgccatgccgatggctcccccggccaccccgctccggccgtggggccccaccgagccccgcaagggtgctgacatcctcgtcgagtccctcgagcgctgcggcgtccgcgacgtaagtttctgcttctacctttgatatatatataataattatcattaattagtagtaatataatatttcaaatatttttttcaaaataaaagaatgtagtatatagcaattgcttttctgtagtttataacttcgtatagcatacattatacgaagttatacttttctaatatatgaccaaaatttgttaccgaattcaggcgacccatcgctgctttgtctacatcatgttcttcatcatcctccccaggcgacgcgtgctgctgttcttattcagactaccgttcgagtgactgcatggcgtacatctttctgcatcgactttgtacggctacatcgaacatatacacgagatgtctcgtgtgaatagagtcactaatgccttaagcatcggttactccgtagggtacattctgttcttcttatttgtgcatatttttattgttgtttactgattatacgagtagttatacatacatgcacatacatatcatcacatatatcacaatatttttctaaattaaattaaaactaaaaatgactaaatttctaacaccaacgacattgtaatgttttctccaacaactttacctattctacattgttctatttcgaatttcactctataaacaacatagtctacaatggaaaacagtgctttgtacgactatatacgcgatgtgtggctacaacataagacaatatagtcgtttgaagattgaacctatatatcggtacggttaatccgtctatgtacgtgggcatgacgaacacccgtgataacgaaggattaacgtgcacaatcataaatccaaagtaggagcggtgcatgatgagaatcgctctcagtactcgacataatgaaccttacgaggtacaacaggcaggcaggcagggaccaggggccgcctttatttcaggctcgctggccccacgggcgtgctgcgtgcacgaagggcactaccccaacctctcaccgaaaaccgcgctggatcggcaaatcaaacgaggtggtgccccgtgcccactctccacgtccacggcaccatccctctgcagccgctcaccagccatgccgtgtcgcggaacggcacaaccacccccaacccactcacgaaaccccgtcccggccgtgcccgtgtcggtccgcgctcggcaacgaggcggcccgcgctgctgagtcccctggacacccgacaccctgtcggccctttgtttattcatcccgaaatctcatctgcccccacggccgactgcgctgcgccgcccggatatatatacccatcgttatcgatcgactggggactctatcagtgatagagtctagaggatcgctcaggaaggccgctgagatagaggcatggcggccaatgcgggcggcggtggagcgggaggaggcagcggcagcggcagcgtggctgcgccggcggtgtgccgccccagcggctcgcggtggacgccgacgccggagcagatcaggatgctgaaggagctctactacggctgcggcatccggtcgcccagctcggagcagatccagcgcatcaccgccatgctgcggcagcacggcaagatcgagggcaagaacgtcttctactggttccagaaccacaaggcccgcgagcgccagaagcgccgcctcaccagcctcgacgtcaacgtgcccgccgccggcgcggccgacgccaccaccagccaactcggcgtcctctcgctgtcgtcgccgccgccttcaggcgcggcgcctccctcgcccaccctcggcttctacgccgccggcaatggcggcggatcggctgtgctgctggacacgagttccgactggggcagcagcggcgctgccatggccaccgagacatgcttcctgcaggactacatgggcgtgacggacacgggcagctcgtcgcagtggccacgcttctcgtcgtcggacacgataatggcggcggccgcggcgcgggcggcgacgacgcgggcgcccgagacgctccctctcttcccgacctgcggcgacgacggcggcagcggtagcagcagctacttgccgttctggggtgccgcgtccacaactgccggcgccacttcttccgttgcgatccagcagcaacaccagctgcaggagcagtacagcttttacagcaacagcaacagcacccagctggccggcaccggcaaccaagacgtatcggcaacagcagcagcagccgccgccctggagctgagcctcagctcatggtgctccccttaccctgctgcagggagtatgtgagagcaacgcgagctgccactgctcttcactggtaccgttaacagatcattcgacaaagcagcattagtccgttgatcggtggaagaccactcgtcagtgttgagttgaatgtttgatcaataaaatacggcaatgctgtaagggttgttttttatgccattgataatacactgtactgttcagttgttgaactctatttcttagccatgccaagtgcttttcttattttgaataacattacagcaaaaagttgaaagacaaaaaaaaaaacccccgaacagagtgctttgggtcccaagcttctttagactgtgttcggcgttccccctaaatttctccccctatatctcactcacttgtcacatcagcgttctctttccccctatatctccacgctctacagcagttccacctatatcaaacctctataccccaccacaacaatattatatactttcatcttcaactaactcatgtaccttccaatttttttctactaataattatttacgtgcacagaaacttagcaaggagagagagagcggggtgacccaccttgctagttggatattacctcttctcttcaaagtatccttgaacgctcaccggttatcaaatctctacactatagctctgtagtcttgctagatagttagttctttagctctcggtgaccaagcttggcgcgatcaagcttatcgataccgtcgacctcgaagcttggtcacccggtccgggcctagaaggccagcttcaagtttgtacaaaaaagcaggctccggccagaatggcccggaccgggttaccgaattcttaccctagctccctgcggctgttacgcggtcccccatcaatcttctgttcttgcggttgtagcctgtgtaacagtgctagagtatgtatgataaataggttttaagtctgcttacatgacattttttattgtggaagagacatataaaaattagagagagtggttctcatgcaacggcggacggcccggtgctaaaagagcttcaagacaaaataatgaaacaggaagagagtagatttatctaagagccaactttattatatgaatgtgtttattgttggctttagatgatatggtaaggagttagagctaataatagataggctctattattattattattaattaaactcgctctaaggaggaaagtgggaggaagggacgaggacgaagactactggaagcatcgtgcatggatgatggatgtggtgtctcttaatgtaggtggccggaggatgtacgtgttaattgcgcgataagcactcagatccaaccgcaaactacctccacactgacacactgatagagagaaagagagacctccgacgactgccgccgcagatgagccacgtacgtatacgacgtctgccggccggctcaggctgccgccatcaccctgctcgaaagtcgcgttaggcggcgccagctacataggagtatctagtctagccagttagtatactactactgcgctgatgatgaattaactctgcatagatactgtacttgcctccctccaacacccaaccacctcctgctcggctcttaataacttggacacggatcgatgccatccaaggaagaacacgacgacgacgacggaacatccaccatgcaagcttgcatccatacgccgatacgcgtgcatccatccatccaccattatttccattttccaccgatcacacgtacacaggcctatttaaggagcgacatcccactgcaactctcctcaccactcatcaccagctagctctagcaaagcacttgccatctaccgaccgccgcattccaaacagcccgacgagctagcagagcggcaggcacctccctcctcaaggaacccatggccactgtgaacaactggctcgctttctccctctccccgcaggagctgccgccctcccagacgacggactccacactcatctcggccgccaccgccgaccatgtctccggcgatgtctgcttcaacatcccccaagattggagcatgaggggatcagagctttcggcgctcgtcgcggagccgaagctggaggacttcctcggcggcatctccttctccgagcagcatcacaaggccaactgcaacatgatacccagcactagcagcacagtttgctacgcgagctcaggtgctagcaccggctaccatcaccagctgtaccaccagcccaccagctcagcgctccacttcgcggactccgtaatggtggcttcctcggccggtgtccacgacggcggtgccatgctcagcgcggccgccgctaacggtgtcgctggcgctgccagtgccaacggcggcggcatcgggctgtccatgattaagaactggctgcggagccaaccggcgcccatgcagccgagggtggcggcggctgagggcgcgcaggggctctctttgtccatgaacatggcggggacgacccaaggcgctgctggcatgccacttctcgctggagagcgcgcacgggcgcccgagagtgtatcgacgtcagcacagggtggagccgtcgtcgtcacggcgccgaaggaggatagcggtggcagcggtgttgccggcgctctagtagccgtgagcacggacacgggtggcagcggcggcgcgtcggctgacaacacggcaaggaagacggtggacacgttcgggcagcgcacgtcgatttaccgtggcgtgacaaggcatagatggactgggagatatgaggcacatctttgggataacagttgcagaagggaagggcaaactcgtaagggtcgtcaagtctatttaggtggctatgataaagaggagaaagctgctagggcttatgatcttgctgctctgaagtactggggtgccacaacaacaacaaattttccagtgagtaactacgaaaaggagctcgaggacatgaagcacatgacaaggcaggagtttgtagcgtctctgagaaggaagagcagtggtttctccagaggtgcatccatttacaggggagtgactaggcatcaccaacatggaagatggcaagcacggattggacgagttgcagggaacaaggatctttacttgggcaccttcagcacccaggaggaggcagcggaggcgtacgacatcgcggcgatcaagttccgcggcctcaacgccgtcaccaacttcgacatgagccgctacgacgtgaagagcatcctggacagcagcgccctccccatcggcagcgccgccaagcgcctcaaggaggccgaggccgcagcgtccgcgcagcaccaccacgccggcgtggtgagctacgacgtcggccgcatcgcctcgcagctcggcgacggcggagccctggcggcggcgtacggcgcgcactaccacggcgccgcctggccgaccatcgcgttccagccgggcgccgccagcacaggcctgtaccacccgtacgcgcagcagccaatgcgcggcggcgggtggtgcaagcaggagcaggaccacgcggtgatcgcggccgcgcacagcctgcaggacctccaccacctgaacctgggcgcggccggcgcgcacgactttttctcggcagggcagcaggccgccgccgctgcgatgcacggcctgggtagcatcgacagtgcgtcgctcgagcacagcaccggctccaactccgtcgtctacaacggcggggtcggcgacagcaacggcgccagcgccgtcggcggcagtggcggtggctacatgatgccgatgagcgctgccggagcaaccactacatcggcaatggtgagccacgagcaggtgcatgcacgggcctacgacgaagccaagcaggctgctcagatggggtacgagagctacctggtgaacgcggagaacaatggtggcggaaggatgtctgcatgggggactgtcgtgtctgcagccgcggcggcagcagcaagcagcaacgacaacatggccgccgacgtcgggcatggcggcgcgcagctcttcagtgtctggaacgacacttaagcgtacctagtggtacctgacatcttatagtctgcaacctctcgtgtctgaattcctatctttatcaagtgttattgcttccacgactataggacagctttcgtcgaaagcttttgctcatgtgatctcgaaggattcatctagtctgatttttcgtgacttgtatcggttttattggattcatccaacatatatcaataaaaaatgagttgtgtttcctttcttcctagttcagttaaaattatttccctcctgcgcttgtgctgtaattgtctgtgtacctgttgtttgtgactgtgttagttcccttggatatgatttcgtatttgatatgtacatggagatagcttagcttcattattggagtatgaagttagtatgacatagtcactctcctggaaaattgacactgcaaaccatatttttattctgaaccacaaatcctagtcagtccgctggcatatgccgtccgtttgctgaatccagaacgtgggtttggagatgtacggctgagatgcctctatgcgaaggggatttcgtggtgaaacgagatgggagtagagcaacgcccgtggaagatgcttcaaacttccacacttttgagcaacgatcggcagtagtaaggtagacgatttcaagatcaaagcatatgaagataaacaacatcaacaacaaaatttgttggggttctatagagagaaacagagctacatacatacactgttttgtatctaccatctgagatgatgaaaagatgaaaaactaaagaatgccccggcgccaacgccaggacacgccgcgcgcgcgtcacccgagccatctcttgacccagccggcgctgtatatttacacacgttgcagcatcgatcaccacctgttcgatcgcgtcgccgtcaccgggatctgagtcgaaacctagacttgtccatcttctggattggccaacttaattaatgtatgaaataaaaggatgcacacatagtgacatgctaatcactataatgtgggcatcaaagttgtgtgttatgtgtaattactagttatctgaataaaagagaaagagatcatccatatttcttatcctaaatgaatgtcacgtgtctttataattctttgatgaaccagatgcatttcattaaccaaatccatatacatataaatattaatcatatataattaatatcaattgggttagcaaaacaaatctagtctaggtgtgttttgcgaatgcgaccttcttatgtgcttctagtctccaaatgtggttgatagttattttgctctaagatcaacagtaatgaagtataaatcatcgttgtggtgtgctactcggttaattgagcattaacacacacaaacatgacgaggatggtataatctccaaaaatgtgtactttgttaggtgggaccctatagccttgattaatgtgctatgttaggcatgcctggaaacgtgtgacgcatatgttttgtgaacctgttgatattatatgtgcttttatattaccatattttattaaaatactaatatttattactagtaagatataacattctatctagcttaaaaactaaccataaatattccataataactagatttaccaaactaatatactaaatatacataataaatacaaaattaacaagacaataatcaatatttatgagcttaatatatttagacattatggttggtcgacgataatcatgctaacttttcgtaattgcttgattgaaatatgcttagaataatgcctctttgttctacatggcaaatagggaccattatggtgtaacaccctgggaaccacaaacaccccgaaatgctactaaactacacaactaaccttcatatataaaatttcgacagcatctcctttgaaaatttgcatagacgtggaagcaacagagtataaacagatatcatgataagaaaacatactagacattaataatctgctagaaatgggaagaatcctaacttgacgactgcgtaactgactagagtcacacttagctgaccctagtcacttacaactgacttcgtgtcctagatcgatgggccctggccgaagcttggtcacccggtccgggcctagaaggccagcttcaagtttgtaccctggagcttgccgagtgccatccttggacactcgataaagtatattttattttttttattttgccaaccaaactttttgtggtatgttcctacactatgtagatctacatgtaccattttggcacaattacatatttacaaaaatgttttctataaatattagatttagttcgtttatttgaatttcttcggaaaattcacatttaaactgcaagtcactcgaaacatggaaaaccgtgcatgcaaaataaatgatatgcatgttatctagcacaagttacgaccgatttcagaagcagaccagaatcttcaagcaccatgctcactaaacatgaccgtgaacttgttatctagttgtttaaaaattgtataaaacacaaataaagtcagaaattaatgaaacttgtccacatgtcatgatatcatatatagaggttgtgataaaaatttgataatgtttcggtaaagttgtgacgtactatgtgtagaaacctaagtgacctacacataaaatcatagagtttcaatgtagttcactcgacaaagactttgtcaagtgtccgataaaaagtactcgacaaagaagccgttgtcgatgtactgttcgtcgagatctctttgtcgagtgtcacactaggcaaagtctttacggagtgtttttcaggctttgacactcggcaaagcgctcgattccagtagtgacagtaatttgcatcaaaaatagctgagagatttaggccccgtttcaatctcacgggataaagtttagcttcctgctaaactttagctatatgaattgaagtgctaaagtttagtttcaattaccaccattagctctcctgtttagattacaaatggctaaaagtagctaaaaaatagctgctaaagtttatctcgcgagattgaaacagggccttaaaatgagtcaactaatagaccaactaattattagctattagtcgttagcttctttaatctaagctaaaaccaactaatagcttatttgttgaattacaattagctcaacggaattctctgtttttctaaaaaaaaactgcccctctcttacagcaaattgtccgctgcccgtcgtccagatacaatgaacgtacctagtaggaactcttttacacgctcggtcgctcgccgcggatcggagtccccggaacacgacaccactgtggaacacgacaaagtctgctcagaggcggccacaccctggcgtgcaccgagccggagcccggataagcacggtaaggagagtacggcgggacgtggcgacccgtgtgtctgctgccacgcagccttcctccacgtagccgcgcggccgcgccacgtaccagggcccggcgctggtataaatgcgcgccacctccgctttagttctgcatacagccaacccaaggatgtccaacctgctcacggttcaccagaaccttccggctcttccagtggacgcgacgtccgatgaagtcaggaagaacctcatggacatgttccgcgacaggcaagcgttcagcgagcacacctggaagatgctgctctccgtctgccgctcctgggctgcatggtgcaagctgaacaacaggaagtggttccccgctgagcccgaggacgtgagggattaccttctgtacctgcaagcgcgaggtttgtttctgcttctacctttgatatatatataataattatcattaattagtagtaatataatatttcaaatatttttttcaaaataaaagaatgtagtatatagcaattgcttttctgtagtttataagtgtgtatattttaatttataacttttctaatatatgaccaaaacatggtgatgcctaggtctggcagtgaagaccatccagcaacaccttggacaactgaacatgcttcacaggcgctccggcctcccgcgccccagcgactcgaacgccgtgagcctcgtcatgcgccgcatcaggaaggaaaacgtcgatgccggcgaaagggcaaagcaggccctcgcgttcgagaggaccgatttcgaccaggtccgcagcctgatggagaacagcgacaggtgccaggacattaggaacctggcgttcctcggaattgcatacaacacgctcctcaggatcgcggaaattgcccgcattcgcgtgaaggacattagccgcaccgacggcggcaggatgcttatccacattggcaggaccaagacgctcgtttccaccgcaggcgtcgaaaaggccctcagcctcggagtgaccaagctcgtcgaacgctggatctccgtgtccggcgtcgcggacgacccaaacaactacctcttctgccgcgtccgcaagaacggggtggctgcccctagcgccaccagccaactcagcacgagggccttggaaggtattttcgaggccacccaccgcctgatctacggcgcgaaggatgacagcggtcaacgctacctcgcatggtccgggcactccgcccgcgttggagctgctagggacatggcccgcgccggtgtttccatccccgaaatcatgcaggcgggtggatggacgaacgtgaacattgtcatgaactacattcgcaaccttgacagcgagacgggcgcaatggttcgcctcctggaagatggtgactgagctagacccagctttcttgtacaaagtggccgttaacggatccagacttgtccatcttctggattggccaacttaattaatgtatgaaataaaaggatgcacacatagtgacatgctaatcactataatgtgggcatcaaagttgtgtgttatgtgtaattactagttatctgaataaaagagaaagagatcatccatatttcttatcctaaatgaatgtcacgtgtctttataattctttgatgaaccagatgcatttcattaaccaaatccatatacatataaatattaatcatatataattaatatcaattgggttagcaaaacaaatctagtctaggtgtgttttgcgaattgcggcaagctgttaccgaattcctgcccttaaggccaattgttcaagattcattcaacaattgaaacatctcccatgattaaatcagtataaggttgctatggtcttgcttgacaaagtttttttttgagggaatttcaactaaatttttgagtgaaactatcaaatactgattttaaaaaatttttataaaaggaagcgcagagataaaaggccatctatgctacaaaagtacccaaaaatgtaatcctaaagtatgaattgcattttttttttgtttggacgaaaggaaaggagtattaccacaagaatgatatcatcttcatatttagatcttttttgggtaaagcttgagattctctaaatatagagaaatcagaagaaaaaaaaaccgtgttttggtggttttgatttctagcctccacaataactttgacggcgtcgacaagtctaacggacaccaagcagcgaaccaccagcgccgagccaagcgaagcagacggccgagacgttgacaccttcggcgcggcatctctcgagagttccgctccggcgctccacctccaccgctggcggtttcttattccgttccgttccgcctcctgctctgctcctctccacaccacacggcacgaaaccgttacggcaccggcagcacccagcacgggagaggggattcctttcccaccgttccttccctttccgccccgccgctataaatagccagccccatccccagcttttttccccaatctcatctcctctctcctgttgttcggagcacacgcacaatccgatcgatccccaaatccccttcgtctctcctcgcgagcctcgtggatcccagcttcaaggtacggcgatcgatcatcccccctccttctctctaccttcttttctctagactacatcggatggcgatccatggttagggcctgctagtttcccttcctgttttgtcgatggctgcgaggcacaatagatctgatggcgttatgacggctaacttgtcatgttgttgcgatttatagtccctttaggagatcagtttaatttctcggatggttcgagatcggtggtccatggttagtaccctaagatccgcgctgttagggttcgtagatggaggcgacctgttctgattgttaacttgtcagtacctgggaaatcctgggatggttctagctcgtccgcagatgagatcgatttcatgatcctctgtatcttgtttcgttgcctaggttccgtctaatctatccgtggtatgatgtagatgttttgatcgtgctaactacgtcttgtaaagttaattgtcaggtcataatttttagcatgcctttttttttgtttggttttgtctaattgggctgtcgttctagatcagagtagaagactgttccaaactacctgctggatttattgaacttggatctgtatgtgtgtcacatatcttcataaattcatgattaagatggattgaaatatcttttatctttttggtatggatagttctatatgttggtgtggctttgttagatgtatacatgcttagatacatgaagcaacgtgctgctactgtttagtaattgctgttcatttgtctaataaacagataaggatatgtatttatgttgctgttggttttgctggtactttgttggatacaaatgcttcaatacagaaaacagcatgctgctacgatttaccatttatctaatcttatcatatgtctaatctaataaacaaacatgcttttaaattatcttcatatgcttggatgatggcatacacagcggctatgtgtggttttttaaatacccagcatcatgggcatgcatgacactgctttaatatgctttttatttgcttgagactgtttcttttgtttatactgaccctttagttcggtgactcttctgcaggtcgactttaacttagcctaggatccatggcccagtccaagcacggcctgaccaaggagatgaccatgaagtaccgcatggagggctgcgtggacggccacaagttcgtgatcaccggcgagggcatcggctaccccttcaagggcaagcaggccatcaacctgtgcgtggtggagggcggccccttgcccttcgccgaggacatcttgtccgccgccttcatgtacggcaaccgcgtgttcaccgagtacccccaggacatcgtcgactacttcaagaactcctgccccgccggctacacctgggaccgctccttcctgttcgaggacggcgccgtgtgcatctgcaacgccgacatcaccgtgagcgtggaggagaactgcatgtaccacgagtccaagttctacggcgtgaacttccccgccgacggccccgtgatgaagaagatgaccgacaactgggagccctcctgcgagaagatcatccccgtgcccaagcagggcatcttgaagggcgacgtgagcatgtacctgctgctgaaggacggtggccgcttgcgctgccagttcgacaccgtgtacaaggccaagtccgtgccccgcaagatgcccgactggcacttcatccagcacaagctgacccgcgaggaccgcagcgacgccaagaaccagaagtggcacctgaccgagcacgccatcgcctccggctccgccttgccctccggactcagatctcgatagggtaccaatggccagttaacagatccagctgctgctgttctagggttcacaagtctgcctatttgtcttccccaatggagctatggttgtctggtctggtccttggtcgtgtcccgtttcattgtgtactatttacctgtaatgtgtatccttaagtctggtttgatggtgtctgaaacgttttgctgtggtagagcagcatggaagaactataatgaataagtgatccctaatcattgtgtccaaattttgcttctgctatacccttttgtgctgtttcttatgttttgcttaaaaatttgatctgacaaacaaatttgtctaaattatgctcttgttctgactgtgtactgtacacatttgtattgctaccggtttggcacatagttttctctttgattgcagatcaaacccttctgattgcagattgcttggctatggctgatgtgctcactgttcttctttagcttgtatattgctgatggtggcttggctacggctgaaaaagttgctgctgcgccgacttggcaactgttgctccagtaatgctttgtcctctcttcctagccgccgacttggcacttggcagctgttgctcctgtaatgcgttgttatctcttatctcttgagatgtactatgattttgaggctgtttgacttgtgccagattgccagtgctgatgctatattatctcaggtttttatgctagtatatgttttactgtgtgctgcctgtgtcgagttacgtaatctattgaaccgctatgcgtgttgatgccctgttgttgcttgccagattgatgcccctgttgcttgcagcttgcaagctgtagtgaaatcctaaaattcgaaaccaaatctattctgaacttttgaagatctgtgatgtccggaagaaaagattcaaacagataaacgggactctccagaatctataaaataaatgatcgacaaacgctttgctttggtaggcttcctagttagttagcggaccgaagcttcggtccgggcctagaaggccagcttcggccgccccatttcaaatatttttttcaaaataaaagaatgtagtatatagcaattgcttttctgtagtttataacttcgtatagcatacattatacgaagttatacttttctaatatatgaccaaaatttgttgatgtgcaggtcttcgcctaccccggcggcgcgtccatggagatccaccaggcactcacccgctcccccgtcatcgccaaccacctcttccgccacgagcaaggggaggcctttgccgcctccggctacgcgcgctcctcgggccgcgtcggcgtctgcatcgccacctccggccccggcgccaccaacctagtctccgcgctcgccgacgcgctgctcgattccgtccccatggtcgccatcacgggacaggtggcgcgacgcatgattggcaccgacgccttccaggagacgcccatcgtcgaggtcacccgctccatcaccaagcacaactacctggtcctcgacgtcgacgacatcccccgcgtcgtgcaggaggctttcttcctcgcctcctctggtcgaccagggccggtgcttgtcgacatccccaaggacatccagcagcagatggcggtgcctgtctgggacaagcccatgagtctgcctgggtacattgcgcgccttcccaagccccctgcgactgagttgcttgagcaggtgctgcgtcttgttggtgaatcgcggcgccctgttctttatgtgggcggtggctgcgcagcatctggtgaggagttgcgacgctttgtggagctgactggaatcccggtcacaactactcttatgggcctcggcaacttccccagcgacgacccactgtctctgcgcatgctaggtatgcatgggacggtgtatgcaaattatgcagtggataaggccgatctgttgcttgcacttggtgtgcggtttgatgatcgcgtgacagggaagattgaggcttttgcaagcagggctaagattgtgcacgttgatattgatccggctgagattggcaagaacaagcagccacatgtgtccatctgtgcagatgttaagcttgctttgcagggcatgaatgctcttcttgaaggaagcacatcaaagaagagctttgactttggctcatggaacgatgagttggatcagcagaagagggaattcccccttgggtataaaacatctaatgaggagatccagccacaatatgctattcaggttcttgatgagctgacgaaaggcgaggccatcatcggcacaggtgttgggcagcaccagatgtgggcggcacagtactacacttacaagcggccaaggcagtggttgtcttcagctggtcttggggctatgggatttggtttgccggctgctgctggtgcttctgtggcaaacccaggtgtcactgttgttgacatcgatggagatggtagctttctcatgaacgttcaggagctagctatgatccgaattgagaacctcccagtgaaggtctttgtgctaaacaaccagcacctggggatggtggtgcagttggaggacaggttctataaggccaacagagcgcacacatacttgggaaacccagagaatgaaagtgagatatatccagatttcgtgacgatcgccaaagggttcaacattccagcggtccgtgtgacaaagaagaacgaagtccgcgcagcgataaagaagatgctcgagactccagggccgtacctcttggatataatcgtcccacaccaggagcatgtgttgcctatgatccctagtggtggggctttcaaggatatgatcctggatggtgatggcaggactgtgtactgatgactagctagtcagttaacagatctgccagatcctcggtgtacaaataacccgtcttatcctatgagacgggccggcgtcagtgtgttctggaggaatttttatgtcagagcctttttctttgtgtgcttgatgtagatgccaagggaagcttattggctgttgaagcttgatgcaaaataaattatggaactctgttttttgtttatctaataataactagcaaatatgcttccattgcattgaaactaacagccttttgtgtttccaagttttattttgtgacaatgtcatctatttcaattagttgtggaatcggaaacttgcaggactaacttggaaactccaatccctcagcatcctggactttttcctggtgtaatccatgtagatattattttaatcatcattttagttctggaggtttttccatctccggttttgctcccctttcttcaaaaaaaaaaaaaaaatgccgtaggcgccgcaacgcccacctgttgttcaaactcatgggcacgagtggctcgaagattttatacaacaattgctgtagtttcaccgttgctggtgaagaagcatttttttaaaaaaatatagtggtattcattttaattagtttagttgtgcagcgagcaaaatttggacatgctctgctcggaatctgatcgacctagacacagattagcagcagtagctttgtcatctgttccaagagttgcgatctgatagaagaaaaaaaaaccttcccttcaatgtaaaaccgaaactaacaagaaagaagcacagtgccgtttaggcaagtatggagtacgtattaagcatgtagaaggccatgcatgaaccactaacaagaaagaagcgcagtgccattcaggcaagcataagcatgtagattggcatgcatgaacaactaacagtagatcgtctctggtctgattagaagttttttgggaagccaagaaatcatgtacaactggttccatctcaaattccgtggcaaaaagaggcctaagcaacataaagctttccactggttgccatatatgatttgggcatttcactttgatcttaatgggccttgtaaagcccaagactcatgattatctttagttgatgctcttaattaggtgtgggcaaataattcaaactgtatgtacccgaccaaaaccaaagcaaaaataatcgaaccaaaccgaaaatttaaaaataaccgaatgaaaactaaatcctataactgaaagaactgaaaccgaatcaaaatatttaatgtaaccaaaaatatccgaaatataattatattgtcaaaaatattaataatttctagattaaataattaaaaatacttaaaaatttatataaaatagtaaaaatactcgaaaataaccacaaatattcaaaaacaaccgaaatatcccaaaatattcaaagcaaaataaccgaatggataccaaattttaaaaccgaaaaaactggaacaaaaccaaaatcgaaccaaaatttcaaaaatcgaataaatactaaactttagaacaaaaaaaaacgataaccgaatgtatacgaaccaaagccgaattagataaccgaacgtccaggactactcttaatctttccgccacttatgatttgggctattactttgtttataatgagccttttcaagctcaagttcatgattgtccgtgagatgagaaactgacttgttggattcgaaaccctagctagtattggttaatacttaatacataaatgacctgcattgacatcatcatccaagaaaataaaaattgtatgcttgagatatttagttttcctagctaggttttctttattttagtaccgaatctttaggtgtgccacgttaatttagacccattttttcatacttaccaactgagtctagtttaatcatgactataatcgtataaaatgattcagtcgacgtcattgcgaacgtatataaaatcatccaaattgacgtcattccaaagaggtaagcatgcttatctaagagtccgagcatactaaacaagacgacattttatttgcactccaaatcaaattttgtattgcctaaagaaaaacaatcaaactcaagtttcttaaaattaatttcattcaaactaatcactttcaatatctcacatattattcatgccatttctatttgtctaaacatgatttaaaaaaaaaagtaaaatacaaagattactatgcaaaaactctataaaaaaaaattcaaatttcttatttatttgtgacatcaaattttcaaaataatttttttaattatcggttgatccggtcagtcgataaaaacataaactttcagcgaccgttaaaactttcctactaccgatttagagaaaatcttagcttgaaacgtaattgtaacctgccttcatgcaagtcgcaagatatgtcatcctaagttgtatatgttttctcaaaagatgtatttacttgagaaaatacgtttcaacgttgatggacaaccaattaagaatcaagcacctttcgtaatcaatttaggcttatcgtctaaggtatactgatttacgacagttgactagacttataaggaacaaaataatagaatagtttctaaacacttcacctaatcatagagactaagatggtaattcgtaaacgacaaagcctagtgacactgtccattgtaaaattccacatcatattagtattaaacatatacatgtagtttcctgaacacatgtagtatcaaacacacttcgtggcttcttcctcgaaacctgcggccgctcattaattaagtcatctagttgaaggatcgctatcaactttgtatagaaaagttgggccgaattcgagctcggtacggccagaatggcccggaccgaagcttaccggtttgatcatttgttcatctcacatgatagttctaacaatatgcacaaattctatacatatctctcgtagttccataaactacgagagagatataggttttatgaacaaatttatttttagtttatcatatgaagaaatgttcaaaatataaaatgtacatcatgatgagttatacaaatttgtagttgaaaactttttcatttgaattaatttactgctttaaaatgtgtatgcagttggcttgatgtgagacaataagctaaaccacgggttttccatgggtttccacccaattacgggttggtttgggatcaataatgttattggatgggttgggtttaactttcctctagtatttttggttgggtgtgggatggatatcaaagtaattagatttgggtatgggtgggagcggattggattttttgccattagcaggcctatgcacttgtcggcgcacacggctggcgcgtgcacacaccttatcggcagacgccgccgctgctgctgctgatgcttcttcttcttccaccgattgattgagatccaaggaaatgctgggcgcgtttttaaactggctgatcggcttcgtcccatgatctgagatttccttttcagactgttgtatatgtagcggcgacatggataggatatgtatggaccgttttaattaatactaaatatcaatggtttaactcttcactattactcctagctagatgtgaaagctcgccctggaatgcacatgaacaactacaccgagttgggcagtttggcaatgcatgcagttcaagagccacgccggttaacccttcactttgtagttattgcctgcattttgtaaatttggtgtgaacttaattctaatctgtaattctgtatagagaatggtgcatgtactgaactcctgactgatcaaaacgtggggtccactttcctcgccgaaaaagaaaagagaaaaaaaggtttattgtccactttattaaaaactggacttatatatatgcttggaacaaatacttagggggtgtttggttttaggaatctctcaatctaaaataaggtggtgtatcataggtttattactcaaatttggtgggatgatctcattgctcatattagtactaactaactaactatgaggaatgagatggtgatggatcaacccattacattctacaaaccaaacaaaaaagtgaggagtgagaagatggtgaactagctcatttctcaaaccaaacactctattaataaaccaatcgcgtagctaataaatatatgtaacctcgacattctagctacagcttgtggttggtagaaaagcaaatcatgctcaaaataatgtgctccgaaacttcattacatttttcttcacttgagtgtacatacattttttttcccttggccctcttatccttaactaagaagcataaaacgggatttctcagccagttcttagcttctcttataaatacagaccttgtacaacactttcacctcctctcaggtggccaggatattttttctggccccttcctgccctcttcacactgacccatgtgttgttctatccctggaaagctatacctccttacccctatcagcttctcctcacatctcctctcgtcgccacccatgctatcaccgctctgatcacaagcaaggcaaaccctcactgttctatcaacgcccctcccttagctagcctaggcgcgccatttaaatatggaaagccatcgcatgcgtgtaggtgctcttgcatggagttcttcgttgctttcttctggaagccgtgacaagagcatcctccaccatgatatccgtgctcaagaagatcatgttagcaagcttaccgggcataaatctgaggtttgtggactcaagtggtcttatgacaatcgtcagcttgcatcgggtggcaatgacaacagacttttcgtttggaatccacattcagtacagccagtactgaagtatactgagcacacagcagctgtcaaagctattgcctggtcacctcatctccatgggctgcttgcatctggtggaggaactgcagatagatgcatacgattttggaatacgaccacaaatgcacacttgagctgtgtggacactggcagccaggtctgcaatcttgcgtggtcaaagaatgtaaatgagcttgttagcacccacggctactctcagaaccaaataattgtttggagatatccaacaatgtcgaagcttgccactttgacagggcatacatacagagtattgtacttagctatttcccctgatggccagaccatagttactggtgctggtgatgaaacgctccggttttggaacgtgttcccctctccaaagtcccagagttctgacagtttaagttgcgtcggaggaacatctttcgttagaagctacatccggtgaatttaaatgcccgggcgatcgctcgaggcgtacctagtggtaccacatggttaacctagacttgtccatcttctggattggccaacttaattaatgtatgaaataaaaggatgcacacatagtgacatgctaatcactataatgtgggcatcaaagttgtgtgttatgtgtaattactagttatctgaataaaagagaaagagatcatccatatttcttatcctaaatgaatgtcacgtgtctttataattctttgatgaaccagatgcatttcattaaccaaatccatatacatataaatattaatcatatataattaatatcaattgggttagcaaaacaaatctagtctaggtgtgttttgcgaatgcggccgccaccgcggtggagctcgaattccggtccgggcctagaaggccagcttcaagtttgtacaaaaaagcaggctccggccagaatggcccggaccgggttaccgaattcgagctcggtaccctgggatccgatatcgatgggccctggccgaagcttggtcacccggtccgggcctagaaggccgatctcccgggcacccagctttcttgtacaaagtggccgttaacggatcggccagaatggcccggaccgaagcttgcatgcctgcagtgcagcgtgacccggtcgtgcccctctctagagataatgagcattgcatgtctaagttataaaaaattaccacatattttttttgtcacacttgtttgaagtgcagtttatctatctttatacatatatttaaactttactctacgaataatataatctatagtactacaataatatcagtgttttagagaatcatataaatgaacagttagacatggtctaaaggacaattgagtattttgacaacaggactctacagttttatctttttagtgtgcatgtgttctcctttttttttgcaaatagcttcacctatataatacttcatccattttattagtacatccatttagggtttagggttaatggtttttatagactaatttttttagtacatctattttattctattttagcctctaaattaagaaaactaaaactctattttagtttttttatttaataatttagatataaaatagaataaaataaagtgactaaaaattaaacaaataccctttaagaaattaaaaaaactaaggaaacatttttcttgtttcgagtagataatgccagcctgttaaacgccgtcgacgagtctaacggacaccaaccagcgaaccagcagcgtcgcgtcgggccaagcgaagcagacggcacggcatctctgtcgctgcctctggacccctctcgagagttccgctccaccgttggacttgctccgctgtcggcatccagaaattgcgtggcggagcggcagacgtgagccggcacggcaggcggcctcctcctcctctcacggcaccggcagctacgggggattcctttcccaccgctccttcgctttcccttcctcgcccgccgtaataaatagacaccccctccacaccctctttccccaacctcgtgttgttcggagcgcacacacacacaaccagatctcccccaaatccacccgtcggcacctccgcttcaaggtacgccgctcgtcctcccccccccccctctctaccttctctagatcggcgttccggtccatgcatggttagggcccggtagttctacttctgttcatgtttgtgttagatccgtgtttgtgttagatccgtgctgctagcgttcgtacacggatgcgacctgtacgtcagacacgttctgattgctaacttgccagtgtttctctttggggaatcctgggatggctctagccgttccgcagacgggatcgatttcatgattttttttgtttcgttgcatagggtttggtttgcccttttcctttatttcaatatatgccgtgcacttgtttgtcgggtcatcttttcatgcttttttttgtcttggttgtgatgatgtggtctggttgggcggtcgttctagatcggagtagaattctgtttcaaactacctggtggatttattaattttggatctgtatgtgtgtgccatacatattcatagttacgaattgaagatgatggatggaaatatcgatctaggataggtatacatgttgatgcgggttttactgatgcatatacagagatgctttttgttcgcttggttgtgatgatgtggtgtggttgggcggtcgttcattcgttctagatcggagtagaatactgtttcaaactacctggtgtatttattaattttggaactgtatgtgtgtgtcatacatcttcatagttacgagtttaagatggatggaaatatcgatctaggataggtatacatgttgatgtgggttttactgatgcatatacatgatggcatatgcagcatctattcatatgctctaaccttgagtacctatctattataataaacaagtatgttttataattattttgatcttgatatacttggatgatggcatatgcagcagctatatgtggatttttttagccctgccttcatacgctatttatttgcttggtactgtttcttttgtcgatgctcaccctgttgtttggtgttacttctgcaggtcgactttaacttagcctaggatccatggcctcctccgagaacgtcatcaccgagttcatgcgcttcaaggtgcgcatggagggcaccgtgaacggccacgagttcgagatcgagggcgagggcgagggccgcccctacgagggccacaacaccgtgaagctgaaggtgaccaagggcggccccctgcccttcgcctgggacatcctgtccccccagttccagtacggctccaaggtgtacgtgaagcaccccgccgacatccccgactacaagaagctgtccttccccgagggcttcaagtgggagcgcgtgatgaacttcgaggacggcggcgtggcgaccgtgacccaggactcctccctgcaggacggctgcttcatctacaaggtgaagttcatcggcgtgaacttcccctccgacggccccgtgatgcagaagaagaccatgggctgggaggcctccaccgagcgcctgtacccccgcgacggcgtgctgaagggcgagacccacaaggccctgaagctgaaggacggcggccactacctggtggagttcaagtccatctacatggccaagaagcccgtgcagctgcccggctactactacgtggacgccaagctggacatcacctcccacaacgaggactacaccatcgtggagcagtacgagcgcaccgagggccgccaccacctgttcctgtagggtaccacatggttaacctagacttgtccatcttctggattggccaacttaattaatgtatgaaataaaaggatgcacacatagtgacatgctaatcactataatgtgggcatcaaagttgtgtgttatgtgtaattactagttatctgaataaaagagaaagagatcatccatatttcttatcctaaatgaatgtcacgtgtctttataattctttgatgaaccagatgcatttcattaaccaaatccatatacatataaatattaatcatatataattaatatcaattgggttagcaaaacaaatctagtctaggtgtgttttgcgaatgcggccgccaccgcggtggagctcgaattccggtccgggcctagaaggccagcttcggccgccccgggcaactttattatacaaagttgatagatcctcatgtcttcatcgtaagcttaaacaggccagaatggcctctggattcagcggcctagaaggccgaagtacttggtcttcctagtcgagtagatcacattcaagcttggtcacccggtccgtcaatattctgattccgatgacttcgtaggttcctagctcaagccgctcgtgtccaagcgtcacttacgattagctaatgattacggcatctaggaccgactagtggcgcgccgactagctagctaaggtaccgagctcgaattcattccgattaatcgtggcctcttgctcttcaggatgaagagctatgtttaaacgtgcaagcgctactagacaattcagtacattaaaaacgtccgcaatgtgttattaagttgtctaagcgtcaatttgtttacaccacaatatatcctgcca

SEQ ID NO: 33 - DNA, 28752 bp, Artificial Sequence
  RX000005
gtttacccgccaatatatcctgtcaaacactgatagtttaaactgaaggcgggaaacgacaatctgatcatgagcggagaattaagggagtcacgttatgacccccgccgatgacgcgggacaagccgttttacgtttggaactgacagaaccgcaacgttgaaggagccactcagcaagctggtacgattgtaatacgactcactatagggcgaattgagcgctgtttaaacgctcttcaactggaagagcggttacgctgtttaaacgctcttcaactggaagagcggttactaccggttcactagctagctgctaatcgagctagttaccctatgaggtgacatgaagcgctcacggttactatgacggttagcttcacgactgttggtggcagtagcgtacgacttagctatagttccggacttacccttaagcgatttaaatctgcggttaccgaattcgagctcggtaccctgggatctgcccttactttaacgcctctaaccaacacccctttatctttataaggaacaataaacagaatttgccccactgttctaaatcacctaataatatccccagctaaaaacaataaaggtttcctagaattaagacaagcatgactgttcctccaggagggtttggaacattgttgcagtcttgcagatacgggcgaagggtgagaaacagagcggagggctggaggtgacctcggtagtcgacgccggagttgagcttgacaacgacggggcggcccctgatggacttgaggaagtccgatggcgtcttcaccgtcccgccggcgcccgaggcgggcctgtcgctgccgccgccgccgctgctcatcttgcgcgctgtgcccccggcggtgtccctgtgttgcggatcgcgggtgggccaggtggatgcgagggcgacccgtttggactccggccggagccgccggatccctggtcggtgtcagtgccgtttactctgggccccacgtgtcagtaccgtctgtagatgacaacaacccgtcgtccacagtcatgtccaaaatatcctttcttcttttttttcgattcggatatctatcttccttttttttttccaaaaatcttcttgacgcaccagcgcgcacgtttgtggtaaacgccgacacgtcggtcccacgtcgatagaccccacccaccagtgagtagcgtgtacgtattcgggggtgacggacgtgtcgccgtcgtcttgctagtcccattcccatctgagccacacatctctgaacaaaaaaaaggagggaggcctccacgcacatccccctccgtgccacccgccccaaaccctcgcgccgcctccgagacagccgccgcaaccatggccaccgccgccgccgcgtctaccgcgctcactggcgccactaccgctgcgcccaaggcgaggcgccgggcgcacctcctggccacccgccgcgccctcgccgcgcccatcaggtgctcagcggcgtcacccgccatgccgatggctcccccggccaccccgctccggccgtggggccccaccgagccccgcaagggtgctgacatcctcgtcgagtccctcgagcgctgcggcgtccgcgacgtaagtttctgcttctacctttgatatatatataataattatcattaattagtagtaatataatatttcaaatatttttttcaaaataaaagaatgtagtatatagcaattgcttttctgtagtttataacttcgtatagcatacattatacgaagttatacttttctaatatatgaccaaaatttgttaccgaattcaggcgacccatcgctgctttgtctacatcatgttcttcatcatcctccccaggcgacgcgtgctgctgttcttattcagactaccgttcgagtgactgcatggcgtacatctttctgcatcgactttgtacggctacatcgaacatatacacgagatgtctcgtgtgaatagagtcactaatgccttaagcatcggttactccgtagggtacattctgttcttcttatttgtgcatatttttattgttgtttactgattatacgagtagttatacatacatgcacatacatatcatcacatatatcacaatatttttctaaattaaattaaaactaaaaatgactaaatttctaacaccaacgacattgtaatgttttctccaacaactttacctattctacattgttctatttcgaatttcactctataaacaacatagtctacaatggaaaacagtgctttgtacgactatatacgcgatgtgtggctacaacataagacaatatagtcgtttgaagattgaacctatatatcggtacggttaatccgtctatgtacgtgggcatgacgaacacccgtgataacgaaggattaacgtgcacaatcataaatccaaagtaggagcggtgcatgatgagaatcgctctcagtactcgacataatgaaccttacgaggtacaacaggcaggcaggcagggaccaggggccgcctttatttcaggctcgctggccccacgggcgtgctgcgtgcacgaagggcactaccccaacctctcaccgaaaaccgcgctggatcggcaaatcaaacgaggtggtgccccgtgcccactctccacgtccacggcaccatccctctgcagccgctcaccagccatgccgtgtcgcggaacggcacaaccacccccaacccactcacgaaaccccgtcccggccgtgcccgtgtcggtccgcgctcggcaacgaggcggcccgcgctgctgagtcccctggacacccgacaccctgtcggccctttgtttattcatcccgaaatctcatctgcccccacggccgactgcgctgcgccgcccggatatatatacccatcgttatcgatcgactggggactctatcagtgatagagtctagaggatcgctcaggaaggccgctgagatagaggcatggcggccaatgcgggcggcggtggagcgggaggaggcagcggcagcggcagcgtggctgcgccggcggtgtgccgccccagcggctcgcggtggacgccgacgccggagcagatcaggatgctgaaggagctctactacggctgcggcatccggtcgcccagctcggagcagatccagcgcatcaccgccatgctgcggcagcacggcaagatcgagggcaagaacgtcttctactggttccagaaccacaaggcccgcgagcgccagaagcgccgcctcaccagcctcgacgtcaacgtgcccgccgccggcgcggccgacgccaccaccagccaactcggcgtcctctcgctgtcgtcgccgccgccttcaggcgcggcgcctccctcgcccaccctcggcttctacgccgccggcaatggcggcggatcggctgtgctgctggacacgagttccgactggggcagcagcggcgctgccatggccaccgagacatgcttcctgcaggactacatgggcgtgacggacacgggcagctcgtcgcagtggccacgcttctcgtcgtcggacacgataatggcggcggccgcggcgcgggcggcgacgacgcgggcgcccgagacgctccctctcttcccgacctgcggcgacgacggcggcagcggtagcagcagctacttgccgttctggggtgccgcgtccacaactgccggcgccacttcttccgttgcgatccagcagcaacaccagctgcaggagcagtacagcttttacagcaacagcaacagcacccagctggccggcaccggcaaccaagacgtatcggcaacagcagcagcagccgccgccctggagctgagcctcagctcatggtgctccccttaccctgctgcagggagtatgtgagagcaacgcgagctgccactgctcttcactggtaccgttaacagatcattcgacaaagcagcattagtccgttgatcggtggaagaccactcgtcagtgttgagttgaatgtttgatcaataaaatacggcaatgctgtaagggttgttttttatgccattgataatacactgtactgttcagttgttgaactctatttcttagccatgccaagtgcttttcttattttgaataacattacagcaaaaagttgaaagacaaaaaaaaaaacccccgaacagagtgctttgggtcccaagcttctttagactgtgttcggcgttccccctaaatttctccccctatatctcactcacttgtcacatcagcgttctctttccccctatatctccacgctctacagcagttccacctatatcaaacctctataccccaccacaacaatattatatactttcatcttcaactaactcatgtaccttccaatttttttctactaataattatttacgtgcacagaaacttagcaaggagagagagagcggggtgacccaccttgctagttggatattacctcttctcttcaaagtatccttgaacgctcaccggttatcaaatctctacactatagctctgtagtcttgctagatagttagttctttagctctcggtgaccaagcttggcgcgatcaagcttatcgataccgtcgacctcgaagcttggtcacccggtccgggcctagaaggccagcttcaagtttgtacaaaaaagcaggctccggccagaatggcccggaccgggttaccgaattcttaccctagctccctgcggctgttacgcggtcccccatcaatcttctgttcttgcggttgtagcctgtgtaacagtgctagagtatgtatgataaataggttttaagtctgcttacatgacattttttattgtggaagagacatataaaaattagagagagtggttctcatgcaacggcggacggcccggtgctaaaagagcttcaagacaaaataatgaaacaggaagagagtagatttatctaagagccaactttattatatgaatgtgtttattgttggctttagatgatatggtaaggagttagagctaataatagataggctctattattattattattaattaaactcgctctaaggaggaaagtgggaggaagggacgaggacgaagactactggaagcatcgtgcatggatgatggatgtggtgtctcttaatgtaggtggccggaggatgtacgtgttaattgcgcgataagcactcagatccaaccgcaaactacctccacactgacacactgatagagagaaagagagacctccgacgactgccgccgcagatgagccacgtacgtatacgacgtctgccggccggctcaggctgccgccatcaccctgctcgaaagtcgcgttaggcggcgccagctacataggagtatctagtctagccagttagtatactactactgcgctgatgatgaattaactctgcatagatactgtacttgcctccctccaacacccaaccacctcctgctcggctcttaataacttggacacggatcgatgccatccaaggaagaacacgacgacgacgacggaacatccaccatgcaagcttgcatccatacgccgatacgcgtgcatccatccatccaccattatttccattttccaccgatcacacgtacacaggcctatttaaggagcgacatcccactgcaactctcctcaccactcatcaccagctagctctagcaaagcacttgccatctaccgaccgccgcattccaaacagcccgacgagctagcagagcggcaggcacctccctcctcaaggaacccatggccactgtgaacaactggctcgctttctccctctccccgcaggagctgccgccctcccagacgacggactccacactcatctcggccgccaccgccgaccatgtctccggcgatgtctgcttcaacatcccccaagattggagcatgaggggatcagagctttcggcgctcgtcgcggagccgaagctggaggacttcctcggcggcatctccttctccgagcagcatcacaaggccaactgcaacatgatacccagcactagcagcacagtttgctacgcgagctcaggtgctagcaccggctaccatcaccagctgtaccaccagcccaccagctcagcgctccacttcgcggactccgtaatggtggcttcctcggccggtgtccacgacggcggtgccatgctcagcgcggccgccgctaacggtgtcgctggcgctgccagtgccaacggcggcggcatcgggctgtccatgattaagaactggctgcggagccaaccggcgcccatgcagccgagggtggcggcggctgagggcgcgcaggggctctctttgtccatgaacatggcggggacgacccaaggcgctgctggcatgccacttctcgctggagagcgcgcacgggcgcccgagagtgtatcgacgtcagcacagggtggagccgtcgtcgtcacggcgccgaaggaggatagcggtggcagcggtgttgccggcgctctagtagccgtgagcacggacacgggtggcagcggcggcgcgtcggctgacaacacggcaaggaagacggtggacacgttcgggcagcgcacgtcgatttaccgtggcgtgacaaggcatagatggactgggagatatgaggcacatctttgggataacagttgcagaagggaagggcaaactcgtaagggtcgtcaagtctatttaggtggctatgataaagaggagaaagctgctagggcttatgatcttgctgctctgaagtactggggtgccacaacaacaacaaattttccagtgagtaactacgaaaaggagctcgaggacatgaagcacatgacaaggcaggagtttgtagcgtctctgagaaggaagagcagtggtttctccagaggtgcatccatttacaggggagtgactaggcatcaccaacatggaagatggcaagcacggattggacgagttgcagggaacaaggatctttacttgggcaccttcagcacccaggaggaggcagcggaggcgtacgacatcgcggcgatcaagttccgcggcctcaacgccgtcaccaacttcgacatgagccgctacgacgtgaagagcatcctggacagcagcgccctccccatcggcagcgccgccaagcgcctcaaggaggccgaggccgcagcgtccgcgcagcaccaccacgccggcgtggtgagctacgacgtcggccgcatcgcctcgcagctcggcgacggcggagccctggcggcggcgtacggcgcgcactaccacggcgccgcctggccgaccatcgcgttccagccgggcgccgccagcacaggcctgtaccacccgtacgcgcagcagccaatgcgcggcggcgggtggtgcaagcaggagcaggaccacgcggtgatcgcggccgcgcacagcctgcaggacctccaccacctgaacctgggcgcggccggcgcgcacgactttttctcggcagggcagcaggccgccgccgctgcgatgcacggcctgggtagcatcgacagtgcgtcgctcgagcacagcaccggctccaactccgtcgtctacaacggcggggtcggcgacagcaacggcgccagcgccgtcggcggcagtggcggtggctacatgatgccgatgagcgctgccggagcaaccactacatcggcaatggtgagccacgagcaggtgcatgcacgggcctacgacgaagccaagcaggctgctcagatggggtacgagagctacctggtgaacgcggagaacaatggtggcggaaggatgtctgcatgggggactgtcgtgtctgcagccgcggcggcagcagcaagcagcaacgacaacatggccgccgacgtcgggcatggcggcgcgcagctcttcagtgtctggaacgacacttaagcgtacctagtggtacctgacatcttatagtctgcaacctctcgtgtctgaattcctatctttatcaagtgttattgcttccacgactataggacagctttcgtcgaaagcttttgctcatgtgatctcgaaggattcatctagtctgatttttcgtgacttgtatcggttttattggattcatccaacatatatcaataaaaaatgagttgtgtttcctttcttcctagttcagttaaaattatttccctcctgcgcttgtgctgtaattgtctgtgtacctgttgtttgtgactgtgttagttcccttggatatgatttcgtatttgatatgtacatggagatagcttagcttcattattggagtatgaagttagtatgacatagtcactctcctggaaaattgacactgcaaaccatatttttattctgaaccacaaatcctagtcagtccgctggcatatgccgtccgtttgctgaatccagaacgtgggtttggagatgtacggctgagatgcctctatgcgaaggggatttcgtggtgaaacgagatgggagtagagcaacgcccgtggaagatgcttcaaacttccacacttttgagcaacgatcggcagtagtaaggtagacgatttcaagatcaaagcatatgaagataaacaacatcaacaacaaaatttgttggggttctatagagagaaacagagctacatacatacactgttttgtatctaccatctgagatgatgaaaagatgaaaaactaaagaatgccccggcgccaacgccaggacacgccgcgcgcgcgtcacccgagccatctcttgacccagccggcgctgtatatttacacacgttgcagcatcgatcaccacctgttcgatcgcgtcgccgtcaccgggatctgagtcgaaacctagacttgtccatcttctggattggccaacttaattaatgtatgaaataaaaggatgcacacatagtgacatgctaatcactataatgtgggcatcaaagttgtgtgttatgtgtaattactagttatctgaataaaagagaaagagatcatccatatttcttatcctaaatgaatgtcacgtgtctttataattctttgatgaaccagatgcatttcattaaccaaatccatatacatataaatattaatcatatataattaatatcaattgggttagcaaaacaaatctagtctaggtgtgttttgcgaatgcgaccttcttatgtgcttctagtctccaaatgtggttgatagttattttgctctaagatcaacagtaatgaagtataaatcatcgttgtggtgtgctactcggttaattgagcattaacacacacaaacatgacgaggatggtataatctccaaaaatgtgtactttgttaggtgggaccctatagccttgattaatgtgctatgttaggcatgcctggaaacgtgtgacgcatatgttttgtgaacctgttgatattatatgtgcttttatattaccatattttattaaaatactaatatttattactagtaagatataacattctatctagcttaaaaactaaccataaatattccataataactagatttaccaaactaatatactaaatatacataataaatacaaaattaacaagacaataatcaatatttatgagcttaatatatttagacattatggttggtcgacgataatcatgctaacttttcgtaattgcttgattgaaatatgcttagaataatgcctctttgttctacatggcaaatagggaccattatggtgtaacaccctgggaaccacaaacaccccgaaatgctactaaactacacaactaaccttcatatataaaatttcgacagcatctcctttgaaaatttgcatagacgtggaagcaacagagtataaacagatatcatgataagaaaacatactagacattaataatctgctagaaatgggaagaatcctaacttgacgactgcgtaactgactagagtcacacttagctgaccctagtcacttacaactgacttcgtgtcctagatcgatgggccctggccgaagcttggtcacccggtccgggcctagaaggccagcttcaagtttgtaccctggagcttgccgagtgccatccttggacactcgataaagtatattttattttttttattttgccaaccaaactttttgtggtatgttcctacactatgtagatctacatgtaccattttggcacaattacatatttacaaaaatgttttctataaatattagatttagttcgtttatttgaatttcttcggaaaattcacatttaaactgcaagtcactcgaaacatggaaaaccgtgcatgcaaaataaatgatatgcatgttatctagcacaagttacgaccgatttcagaagcagaccagaatcttcaagcaccatgctcactaaacatgaccgtgaacttgttatctagttgtttaaaaattgtataaaacacaaataaagtcagaaattaatgaaacttgtccacatgtcatgatatcatatatagaggttgtgataaaaatttgataatgtttcggtaaagttgtgacgtactatgtgtagaaacctaagtgacctacacataaaatcatagagtttcaatgtagttcactcgacaaagactttgtcaagtgtccgataaaaagtactcgacaaagaagccgttgtcgatgtactgttcgtcgagatctctttgtcgagtgtcacactaggcaaagtctttacggagtgtttttcaggctttgacactcggcaaagcgctcgattccagtagtgacagtaatttgcatcaaaaatagctgagagatttaggccccgtttcaatctcacgggataaagtttagcttcctgctaaactttagctatatgaattgaagtgctaaagtttagtttcaattaccaccattagctctcctgtttagattacaaatggctaaaagtagctaaaaaatagctgctaaagtttatctcgcgagattgaaacagggccttaaaatgagtcaactaatagaccaactaattattagctattagtcgttagcttctttaatctaagctaaaaccaactaatagcttatttgttgaattacaattagctcaacggaattctctgtttttctaaaaaaaaactgcccctctcttacagcaaattgtccgctgcccgtcgtccagatacaatgaacgtacctagtaggaactcttttacacgctcggtcgctcgccgcggatcggagtccccggaacacgacaccactgtggaacacgacaaagtctgctcagaggcggccacaccctggcgtgcaccgagccggagcccggataagcacggtaaggagagtacggcgggacgtggcgacccgtgtgtctgctgccacgcagccttcctccacgtagccgcgcggccgcgccacgtaccagggcccggcgctggtataaatgcgcgccacctccgctttagttctgcatacagccaacccaaggatgtccaacctgctcacggttcaccagaaccttccggctcttccagtggacgcgacgtccgatgaagtcaggaagaacctcatggacatgttccgcgacaggcaagcgttcagcgagcacacctggaagatgctgctctccgtctgccgctcctgggctgcatggtgcaagctgaacaacaggaagtggttccccgctgagcccgaggacgtgagggattaccttctgtacctgcaagcgcgaggtttgtttctgcttctacctttgatatatatataataattatcattaattagtagtaatataatatttcaaatatttttttcaaaataaaagaatgtagtatatagcaattgcttttctgtagtttataagtgtgtatattttaatttataacttttctaatatatgaccaaaacatggtgatgcctaggtctggcagtgaagaccatccagcaacaccttggacaactgaacatgcttcacaggcgctccggcctcccgcgccccagcgactcgaacgccgtgagcctcgtcatgcgccgcatcaggaaggaaaacgtcgatgccggcgaaagggcaaagcaggccctcgcgttcgagaggaccgatttcgaccaggtccgcagcctgatggagaacagcgacaggtgccaggacattaggaacctggcgttcctcggaattgcatacaacacgctcctcaggatcgcggaaattgcccgcattcgcgtgaaggacattagccgcaccgacggcggcaggatgcttatccacattggcaggaccaagacgctcgtttccaccgcaggcgtcgaaaaggccctcagcctcggagtgaccaagctcgtcgaacgctggatctccgtgtccggcgtcgcggacgacccaaacaactacctcttctgccgcgtccgcaagaacggggtggctgcccctagcgccaccagccaactcagcacgagggccttggaaggtattttcgaggccacccaccgcctgatctacggcgcgaaggatgacagcggtcaacgctacctcgcatggtccgggcactccgcccgcgttggagctgctagggacatggcccgcgccggtgtttccatccccgaaatcatgcaggcgggtggatggacgaacgtgaacattgtcatgaactacattcgcaaccttgacagcgagacgggcgcaatggttcgcctcctggaagatggtgactgagctagacccagctttcttgtacaaagtggccgttaacggatccagacttgtccatcttctggattggccaacttaattaatgtatgaaataaaaggatgcacacatagtgacatgctaatcactataatgtgggcatcaaagttgtgtgttatgtgtaattactagttatctgaataaaagagaaagagatcatccatatttcttatcctaaatgaatgtcacgtgtctttataattctttgatgaaccagatgcatttcattaaccaaatccatatacatataaatattaatcatatataattaatatcaattgggttagcaaaacaaatctagtctaggtgtgttttgcgaattgcggcaagctgttaccgaattcctgcccttaaggccaattgttcaagattcattcaacaattgaaacatctcccatgattaaatcagtataaggttgctatggtcttgcttgacaaagtttttttttgagggaatttcaactaaatttttgagtgaaactatcaaatactgattttaaaaaatttttataaaaggaagcgcagagataaaaggccatctatgctacaaaagtacccaaaaatgtaatcctaaagtatgaattgcattttttttttgtttggacgaaaggaaaggagtattaccacaagaatgatatcatcttcatatttagatcttttttgggtaaagcttgagattctctaaatatagagaaatcagaagaaaaaaaaaccgtgttttggtggttttgatttctagcctccacaataactttgacggcgtcgacaagtctaacggacaccaagcagcgaaccaccagcgccgagccaagcgaagcagacggccgagacgttgacaccttcggcgcggcatctctcgagagttccgctccggcgctccacctccaccgctggcggtttcttattccgttccgttccgcctcctgctctgctcctctccacaccacacggcacgaaaccgttacggcaccggcagcacccagcacgggagaggggattcctttcccaccgttccttccctttccgccccgccgctataaatagccagccccatccccagcttttttccccaatctcatctcctctctcctgttgttcggagcacacgcacaatccgatcgatccccaaatccccttcgtctctcctcgcgagcctcgtggatcccagcttcaaggtacggcgatcgatcatcccccctccttctctctaccttcttttctctagactacatcggatggcgatccatggttagggcctgctagtttcccttcctgttttgtcgatggctgcgaggcacaatagatctgatggcgttatgacggctaacttgtcatgttgttgcgatttatagtccctttaggagatcagtttaatttctcggatggttcgagatcggtggtccatggttagtaccctaagatccgcgctgttagggttcgtagatggaggcgacctgttctgattgttaacttgtcagtacctgggaaatcctgggatggttctagctcgtccgcagatgagatcgatttcatgatcctctgtatcttgtttcgttgcctaggttccgtctaatctatccgtggtatgatgtagatgttttgatcgtgctaactacgtcttgtaaagttaattgtcaggtcataatttttagcatgcctttttttttgtttggttttgtctaattgggctgtcgttctagatcagagtagaagactgttccaaactacctgctggatttattgaacttggatctgtatgtgtgtcacatatcttcataaattcatgattaagatggattgaaatatcttttatctttttggtatggatagttctatatgttggtgtggctttgttagatgtatacatgcttagatacatgaagcaacgtgctgctactgtttagtaattgctgttcatttgtctaataaacagataaggatatgtatttatgttgctgttggttttgctggtactttgttggatacaaatgcttcaatacagaaaacagcatgctgctacgatttaccatttatctaatcttatcatatgtctaatctaataaacaaacatgcttttaaattatcttcatatgcttggatgatggcatacacagcggctatgtgtggttttttaaatacccagcatcatgggcatgcatgacactgctttaatatgctttttatttgcttgagactgtttcttttgtttatactgaccctttagttcggtgactcttctgcaggtcgactttaacttagcctaggatccatggcccagtccaagcacggcctgaccaaggagatgaccatgaagtaccgcatggagggctgcgtggacggccacaagttcgtgatcaccggcgagggcatcggctaccccttcaagggcaagcaggccatcaacctgtgcgtggtggagggcggccccttgcccttcgccgaggacatcttgtccgccgccttcatgtacggcaaccgcgtgttcaccgagtacccccaggacatcgtcgactacttcaagaactcctgccccgccggctacacctgggaccgctccttcctgttcgaggacggcgccgtgtgcatctgcaacgccgacatcaccgtgagcgtggaggagaactgcatgtaccacgagtccaagttctacggcgtgaacttccccgccgacggccccgtgatgaagaagatgaccgacaactgggagccctcctgcgagaagatcatccccgtgcccaagcagggcatcttgaagggcgacgtgagcatgtacctgctgctgaaggacggtggccgcttgcgctgccagttcgacaccgtgtacaaggccaagtccgtgccccgcaagatgcccgactggcacttcatccagcacaagctgacccgcgaggaccgcagcgacgccaagaaccagaagtggcacctgaccgagcacgccatcgcctccggctccgccttgccctccggactcagatctcgatagggtaccaatggccagttaacagatccagctgctgctgttctagggttcacaagtctgcctatttgtcttccccaatggagctatggttgtctggtctggtccttggtcgtgtcccgtttcattgtgtactatttacctgtaatgtgtatccttaagtctggtttgatggtgtctgaaacgttttgctgtggtagagcagcatggaagaactataatgaataagtgatccctaatcattgtgtccaaattttgcttctgctatacccttttgtgctgtttcttatgttttgcttaaaaatttgatctgacaaacaaatttgtctaaattatgctcttgttctgactgtgtactgtacacatttgtattgctaccggtttggcacatagttttctctttgattgcagatcaaacccttctgattgcagattgcttggctatggctgatgtgctcactgttcttctttagcttgtatattgctgatggtggcttggctacggctgaaaaagttgctgctgcgccgacttggcaactgttgctccagtaatgctttgtcctctcttcctagccgccgacttggcacttggcagctgttgctcctgtaatgcgttgttatctcttatctcttgagatgtactatgattttgaggctgtttgacttgtgccagattgccagtgctgatgctatattatctcaggtttttatgctagtatatgttttactgtgtgctgcctgtgtcgagttacgtaatctattgaaccgctatgcgtgttgatgccctgttgttgcttgccagattgatgcccctgttgcttgcagcttgcaagctgtagtgaaatcctaaaattcgaaaccaaatctattctgaacttttgaagatctgtgatgtccggaagaaaagattcaaacagataaacgggactctccagaatctataaaataaatgatcgacaaacgctttgctttggtaggcttcctagttagttagcggaccgaagcttcggtccgggcctagaaggccagcttcggccgccccatttcaaatatttttttcaaaataaaagaatgtagtatatagcaattgcttttctgtagtttataacttcgtatagcatacattatacgaagttatacttttctaatatatgaccaaaatttgttgatgtgcaggtcttcgcctaccccggcggcgcgtccatggagatccaccaggcactcacccgctcccccgtcatcgccaaccacctcttccgccacgagcaaggggaggcctttgccgcctccggctacgcgcgctcctcgggccgcgtcggcgtctgcatcgccacctccggccccggcgccaccaacctagtctccgcgctcgccgacgcgctgctcgattccgtccccatggtcgccatcacgggacaggtggcgcgacgcatgattggcaccgacgccttccaggagacgcccatcgtcgaggtcacccgctccatcaccaagcacaactacctggtcctcgacgtcgacgacatcccccgcgtcgtgcaggaggctttcttcctcgcctcctctggtcgaccagggccggtgcttgtcgacatccccaaggacatccagcagcagatggcggtgcctgtctgggacaagcccatgagtctgcctgggtacattgcgcgccttcccaagccccctgcgactgagttgcttgagcaggtgctgcgtcttgttggtgaatcgcggcgccctgttctttatgtgggcggtggctgcgcagcatctggtgaggagttgcgacgctttgtggagctgactggaatcccggtcacaactactcttatgggcctcggcaacttccccagcgacgacccactgtctctgcgcatgctaggtatgcatgggacggtgtatgcaaattatgcagtggataaggccgatctgttgcttgcacttggtgtgcggtttgatgatcgcgtgacagggaagattgaggcttttgcaagcagggctaagattgtgcacgttgatattgatccggctgagattggcaagaacaagcagccacatgtgtccatctgtgcagatgttaagcttgctttgcagggcatgaatgctcttcttgaaggaagcacatcaaagaagagctttgactttggctcatggaacgatgagttggatcagcagaagagggaattcccccttgggtataaaacatctaatgaggagatccagccacaatatgctattcaggttcttgatgagctgacgaaaggcgaggccatcatcggcacaggtgttgggcagcaccagatgtgggcggcacagtactacacttacaagcggccaaggcagtggttgtcttcagctggtcttggggctatgggatttggtttgccggctgctgctggtgcttctgtggcaaacccaggtgtcactgttgttgacatcgatggagatggtagctttctcatgaacgttcaggagctagctatgatccgaattgagaacctcccagtgaaggtctttgtgctaaacaaccagcacctggggatggtggtgcagttggaggacaggttctataaggccaacagagcgcacacatacttgggaaacccagagaatgaaagtgagatatatccagatttcgtgacgatcgccaaagggttcaacattccagcggtccgtgtgacaaagaagaacgaagtccgcgcagcgataaagaagatgctcgagactccagggccgtacctcttggatataatcgtcccacaccaggagcatgtgttgcctatgatccctagtggtggggctttcaaggatatgatcctggatggtgatggcaggactgtgtactgatgactagctagtcagttaacagatctgccagatcctcggtgtacaaataacccgtcttatcctatgagacgggccggcgtcagtgtgttctggaggaatttttatgtcagagcctttttctttgtgtgcttgatgtagatgccaagggaagcttattggctgttgaagcttgatgcaaaataaattatggaactctgttttttgtttatctaataataactagcaaatatgcttccattgcattgaaactaacagccttttgtgtttccaagttttattttgtgacaatgtcatctatttcaattagttgtggaatcggaaacttgcaggactaacttggaaactccaatccctcagcatcctggactttttcctggtgtaatccatgtagatattattttaatcatcattttagttctggaggtttttccatctccggttttgctcccctttcttcaaaaaaaaaaaaaaaatgccgtaggcgccgcaacgcccacctgttgttcaaactcatgggcacgagtggctcgaagattttatacaacaattgctgtagtttcaccgttgctggtgaagaagcatttttttaaaaaaatatagtggtattcattttaattagtttagttgtgcagcgagcaaaatttggacatgctctgctcggaatctgatcgacctagacacagattagcagcagtagctttgtcatctgttccaagagttgcgatctgatagaagaaaaaaaaaccttcccttcaatgtaaaaccgaaactaacaagaaagaagcacagtgccgtttaggcaagtatggagtacgtattaagcatgtagaaggccatgcatgaaccactaacaagaaagaagcgcagtgccattcaggcaagcataagcatgtagattggcatgcatgaacaactaacagtagatcgtctctggtctgattagaagttttttgggaagccaagaaatcatgtacaactggttccatctcaaattccgtggcaaaaagaggcctaagcaacataaagctttccactggttgccatatatgatttgggcatttcactttgatcttaatgggccttgtaaagcccaagactcatgattatctttagttgatgctcttaattaggtgtgggcaaataattcaaactgtatgtacccgaccaaaaccaaagcaaaaataatcgaaccaaaccgaaaatttaaaaataaccgaatgaaaactaaatcctataactgaaagaactgaaaccgaatcaaaatatttaatgtaaccaaaaatatccgaaatataattatattgtcaaaaatattaataatttctagattaaataattaaaaatacttaaaaatttatataaaatagtaaaaatactcgaaaataaccacaaatattcaaaaacaaccgaaatatcccaaaatattcaaagcaaaataaccgaatggataccaaattttaaaaccgaaaaaactggaacaaaaccaaaatcgaaccaaaatttcaaaaatcgaataaatactaaactttagaacaaaaaaaaacgataaccgaatgtatacgaaccaaagccgaattagataaccgaacgtccaggactactcttaatctttccgccacttatgatttgggctattactttgtttataatgagccttttcaagctcaagttcatgattgtccgtgagatgagaaactgacttgttggattcgaaaccctagctagtattggttaatacttaatacataaatgacctgcattgacatcatcatccaagaaaataaaaattgtatgcttgagatatttagttttcctagctaggttttctttattttagtaccgaatctttaggtgtgccacgttaatttagacccattttttcatacttaccaactgagtctagtttaatcatgactataatcgtataaaatgattcagtcgacgtcattgcgaacgtatataaaatcatccaaattgacgtcattccaaagaggtaagcatgcttatctaagagtccgagcatactaaacaagacgacattttatttgcactccaaatcaaattttgtattgcctaaagaaaaacaatcaaactcaagtttcttaaaattaatttcattcaaactaatcactttcaatatctcacatattattcatgccatttctatttgtctaaacatgatttaaaaaaaaaagtaaaatacaaagattactatgcaaaaactctataaaaaaaaattcaaatttcttatttatttgtgacatcaaattttcaaaataatttttttaattatcggttgatccggtcagtcgataaaaacataaactttcagcgaccgttaaaactttcctactaccgatttagagaaaatcttagcttgaaacgtaattgtaacctgccttcatgcaagtcgcaagatatgtcatcctaagttgtatatgttttctcaaaagatgtatttacttgagaaaatacgtttcaacgttgatggacaaccaattaagaatcaagcacctttcgtaatcaatttaggcttatcgtctaaggtatactgatttacgacagttgactagacttataaggaacaaaataatagaatagtttctaaacacttcacctaatcatagagactaagatggtaattcgtaaacgacaaagcctagtgacactgtccattgtaaaattccacatcatattagtattaaacatatacatgtagtttcctgaacacatgtagtatcaaacacacttcgtggcttcttcctcgaaacctgcggccgctcattaattaagtcatctagttgaaggatcgctatcaactttgtatagaaaagttgggccgaattcgagctcggtacggccagaatggcccggaccgaagcttaccggtttgatcatttgttcatctcacatgatagttctaacaatatgcacaaattctatacatatctctcgtagttccataaactacgagagagatataggttttatgaacaaatttatttttagtttatcatatgaagaaatgttcaaaatataaaatgtacatcatgatgagttatacaaatttgtagttgaaaactttttcatttgaattaatttactgctttaaaatgtgtatgcagttggcttgatgtgagacaataagctaaaccacgggttttccatgggtttccacccaattacgggttggtttgggatcaataatgttattggatgggttgggtttaactttcctctagtatttttggttgggtgtgggatggatatcaaagtaattagatttgggtatgggtgggagcggattggattttttgccattagcaggcctatgcacttgtcggcgcacacggctggcgcgtgcacacaccttatcggcagacgccgccgctgctgctgctgatgcttcttcttcttccaccgattgattgagatccaaggaaatgctgggcgcgtttttaaactggctgatcggcttcgtcccatgatctgagatttccttttcagactgttgtatatgtagcggcgacatggataggatatgtatggaccgttttaattaatactaaatatcaatggtttaactcttcactattactcctagctagatgtgaaagctcgccctggaatgcacatgaacaactacaccgagttgggcagtttggcaatgcatgcagttcaagagccacgccggttaacccttcactttgtagttattgcctgcattttgtaaatttggtgtgaacttaattctaatctgtaattctgtatagagaatggtgcatgtactgaactcctgactgatcaaaacgtggggtccactttcctcgccgaaaaagaaaagagaaaaaaaggtttattgtccactttattaaaaactggacttatatatatgcttggaacaaatacttagggggtgtttggttttaggaatctctcaatctaaaataaggtggtgtatcataggtttattactcaaatttggtgggatgatctcattgctcatattagtactaactaactaactatgaggaatgagatggtgatggatcaacccattacattctacaaaccaaacaaaaaagtgaggagtgagaagatggtgaactagctcatttctcaaaccaaacactctattaataaaccaatcgcgtagctaataaatatatgtaacctcgacattctagctacagcttgtggttggtagaaaagcaaatcatgctcaaaataatgtgctccgaaacttcattacatttttcttcacttgagtgtacatacattttttttcccttggccctcttatccttaactaagaagcataaaacgggatttctcagccagttcttagcttctcttataaatacagaccttgtacaacactttcacctcctctcaggtggccaggatattttttctggccccttcctgccctcttcacactgacccatgtgttgttctatccctggaaagctatacctccttacccctatcagcttctcctcacatctcctctcgtcgccacccatgctatcaccgctctgatcacaagcaaggcaaaccctcactgttctatcaacgcccctcccttagctagcctaggcgcgccatttaaatatggcggtggcggcgccggcctcggacgccaagccgcgcctcaacgtgccaccgtccatggcatccgcgctccgcctcgatcccgtggggctgggggcgggaccctctatgccgtccccctcccgccgactcgccgagcctcccaagacgccctccccatccaagaccacctacagcgaccgtttcatcccctgccgctcctcctcccgcctccagaacttcgcgctaatcgactcccctctctccccagccaaggacgacacgccctactcccgcctcctccgcgccgagctctttggccccgattcacccaaacccaccaccgccacctccgcagcctccgcctcgcccaacaccaacctcttccgcttcaagaaagaccactccgctcccacctcacccttcgctaaagctgccgccgcgcaccatgactgcaccgcgggatccggagacgcgccgtcgccgcagaagccacccaggaaggtccccaaaacgccgcataaggtcctggacgcgccctccctgcaggacgacttctatctcaacctcgtcgactggtcctcgcagaacgtgctcgccgtcggcctcggcacctgcgtctacctctggtccgcgtccaatagcaaggtcaccaagctctgcgatttggggcctagggacagcgtatgcgccgtgcattggtcacgggaaggctcttatctttccattggcaccggccttggagatgtccagatttgggatagttctcgctgtaagcggattagaaatatgggaggtcaccaaacaaggactggggtattagcatggagctcatgcatcttgtcgtcgggtagcagggacaagaacatactgcagcatgacatccgtgtccccaatgactatatcagcaagttttctggtcatagatcagaggtttgtggactcgaatggtcgcatgacgaccgcgagcttgcctcaggcggaaatgacaaccagttattagtctggaaccaacgatcgcaacagccagttttgcggttgacagaacatacagctgctgttaaagcaatagcgtggtcaccacatcagcaaggactcctagcatcaggaggtggaacagctgatagatgcatcaggttttggaacacggctaacggaaatgttctgaactcaattgacacaggcagccaggtttgcaaccttgcctggtgcaaaaatgtgaatgagcttgtgagcacacatggatattcccaaaatcagatcatggtgtggaaatacccatccatgtcaaaggttgcaactctaactggacatacgatgcgtgtgctttacctcgcgtcgtcgcctgatggacagaccatagtaacaggggcaggtgacgaaactctacggttctggaacatatttccatcagttagaacacagactcctgtgcgtgatattgggctctcgtcattctcaagaagccacatccggtgaatttaaatgcccgggcgatcgctcgaggcgtacctagtggtaccacatggttaacctagacttgtccatcttctggattggccaacttaattaatgtatgaaataaaaggatgcacacatagtgacatgctaatcactataatgtgggcatcaaagttgtgtgttatgtgtaattactagttatctgaataaaagagaaagagatcatccatatttcttatcctaaatgaatgtcacgtgtctttataattctttgatgaaccagatgcatttcattaaccaaatccatatacatataaatattaatcatatataattaatatcaattgggttagcaaaacaaatctagtctaggtgtgttttgcgaatgcggccgccaccgcggtggagctcgaattccggtccgggcctagaaggccagcttcaagtttgtacaaaaaagcaggctccggccagaatggcccggaccgggttaccgaattcgagctcggtaccctgggatccgatatcgatgggccctggccgaagcttggtcacccggtccgggcctagaaggccgatctcccgggcacccagctttcttgtacaaagtggccgttaacggatcggccagaatggcccggaccgaagcttgcatgcctgcagtgcagcgtgacccggtcgtgcccctctctagagataatgagcattgcatgtctaagttataaaaaattaccacatattttttttgtcacacttgtttgaagtgcagtttatctatctttatacatatatttaaactttactctacgaataatataatctatagtactacaataatatcagtgttttagagaatcatataaatgaacagttagacatggtctaaaggacaattgagtattttgacaacaggactctacagttttatctttttagtgtgcatgtgttctcctttttttttgcaaatagcttcacctatataatacttcatccattttattagtacatccatttagggtttagggttaatggtttttatagactaatttttttagtacatctattttattctattttagcctctaaattaagaaaactaaaactctattttagtttttttatttaataatttagatataaaatagaataaaataaagtgactaaaaattaaacaaataccctttaagaaattaaaaaaactaaggaaacatttttcttgtttcgagtagataatgccagcctgttaaacgccgtcgacgagtctaacggacaccaaccagcgaaccagcagcgtcgcgtcgggccaagcgaagcagacggcacggcatctctgtcgctgcctctggacccctctcgagagttccgctccaccgttggacttgctccgctgtcggcatccagaaattgcgtggcggagcggcagacgtgagccggcacggcaggcggcctcctcctcctctcacggcaccggcagctacgggggattcctttcccaccgctccttcgctttcccttcctcgcccgccgtaataaatagacaccccctccacaccctctttccccaacctcgtgttgttcggagcgcacacacacacaaccagatctcccccaaatccacccgtcggcacctccgcttcaaggtacgccgctcgtcctcccccccccccctctctaccttctctagatcggcgttccggtccatgcatggttagggcccggtagttctacttctgttcatgtttgtgttagatccgtgtttgtgttagatccgtgctgctagcgttcgtacacggatgcgacctgtacgtcagacacgttctgattgctaacttgccagtgtttctctttggggaatcctgggatggctctagccgttccgcagacgggatcgatttcatgattttttttgtttcgttgcatagggtttggtttgcccttttcctttatttcaatatatgccgtgcacttgtttgtcgggtcatcttttcatgcttttttttgtcttggttgtgatgatgtggtctggttgggcggtcgttctagatcggagtagaattctgtttcaaactacctggtggatttattaattttggatctgtatgtgtgtgccatacatattcatagttacgaattgaagatgatggatggaaatatcgatctaggataggtatacatgttgatgcgggttttactgatgcatatacagagatgctttttgttcgcttggttgtgatgatgtggtgtggttgggcggtcgttcattcgttctagatcggagtagaatactgtttcaaactacctggtgtatttattaattttggaactgtatgtgtgtgtcatacatcttcatagttacgagtttaagatggatggaaatatcgatctaggataggtatacatgttgatgtgggttttactgatgcatatacatgatggcatatgcagcatctattcatatgctctaaccttgagtacctatctattataataaacaagtatgttttataattattttgatcttgatatacttggatgatggcatatgcagcagctatatgtggatttttttagccctgccttcatacgctatttatttgcttggtactgtttcttttgtcgatgctcaccctgttgtttggtgttacttctgcaggtcgactttaacttagcctaggatccatggcctcctccgagaacgtcatcaccgagttcatgcgcttcaaggtgcgcatggagggcaccgtgaacggccacgagttcgagatcgagggcgagggcgagggccgcccctacgagggccacaacaccgtgaagctgaaggtgaccaagggcggccccctgcccttcgcctgggacatcctgtccccccagttccagtacggctccaaggtgtacgtgaagcaccccgccgacatccccgactacaagaagctgtccttccccgagggcttcaagtgggagcgcgtgatgaacttcgaggacggcggcgtggcgaccgtgacccaggactcctccctgcaggacggctgcttcatctacaaggtgaagttcatcggcgtgaacttcccctccgacggccccgtgatgcagaagaagaccatgggctgggaggcctccaccgagcgcctgtacccccgcgacggcgtgctgaagggcgagacccacaaggccctgaagctgaaggacggcggccactacctggtggagttcaagtccatctacatggccaagaagcccgtgcagctgcccggctactactacgtggacgccaagctggacatcacctcccacaacgaggactacaccatcgtggagcagtacgagcgcaccgagggccgccaccacctgttcctgtagggtaccacatggttaacctagacttgtccatcttctggattggccaacttaattaatgtatgaaataaaaggatgcacacatagtgacatgctaatcactataatgtgggcatcaaagttgtgtgttatgtgtaattactagttatctgaataaaagagaaagagatcatccatatttcttatcctaaatgaatgtcacgtgtctttataattctttgatgaaccagatgcatttcattaaccaaatccatatacatataaatattaatcatatataattaatatcaattgggttagcaaaacaaatctagtctaggtgtgttttgcgaatgcggccgccaccgcggtggagctcgaattccggtccgggcctagaaggccagcttcggccgccccgggcaactttattatacaaagttgatagatcctcatgtcttcatcgtaagcttaaacaggccagaatggcctctggattcagcggcctagaaggccgaagtacttggtcttcctagtcgagtagatcacattcaagcttggtcacccggtccgtcaatattctgattccgatgacttcgtaggttcctagctcaagccgctcgtgtccaagcgtcacttacgattagctaatgattacggcatctaggaccgactagtggcgcgccgactagctagctaaggtaccgagctcgaattcattccgattaatcgtggcctcttgctcttcaggatgaagagctatgtttaaacgtgcaagcgctactagacaattcagtacattaaaaacgtccgcaatgtgttattaagttgtctaagcgtcaatttgtttacaccacaatatatcctgcca

SEQ ID NO: 34 - DNA, 28149 bp, Artificial Sequence
  RX000006
gtttacccgccaatatatcctgtcaaacactgatagtttaaactgaaggcgggaaacgacaatctgatcatgagcggagaattaagggagtcacgttatgacccccgccgatgacgcgggacaagccgttttacgtttggaactgacagaaccgcaacgttgaaggagccactcagcaagctggtacgattgtaatacgactcactatagggcgaattgagcgctgtttaaacgctcttcaactggaagagcggttacgctgtttaaacgctcttcaactggaagagcggttactaccggttcactagctagctgctaatcgagctagttaccctatgaggtgacatgaagcgctcacggttactatgacggttagcttcacgactgttggtggcagtagcgtacgacttagctatagttccggacttacccttaagcgatttaaatctgcggttaccgaattcgagctcggtaccctgggatctgcccttactttaacgcctctaaccaacacccctttatctttataaggaacaataaacagaatttgccccactgttctaaatcacctaataatatccccagctaaaaacaataaaggtttcctagaattaagacaagcatgactgttcctccaggagggtttggaacattgttgcagtcttgcagatacgggcgaagggtgagaaacagagcggagggctggaggtgacctcggtagtcgacgccggagttgagcttgacaacgacggggcggcccctgatggacttgaggaagtccgatggcgtcttcaccgtcccgccggcgcccgaggcgggcctgtcgctgccgccgccgccgctgctcatcttgcgcgctgtgcccccggcggtgtccctgtgttgcggatcgcgggtgggccaggtggatgcgagggcgacccgtttggactccggccggagccgccggatccctggtcggtgtcagtgccgtttactctgggccccacgtgtcagtaccgtctgtagatgacaacaacccgtcgtccacagtcatgtccaaaatatcctttcttcttttttttcgattcggatatctatcttccttttttttttccaaaaatcttcttgacgcaccagcgcgcacgtttgtggtaaacgccgacacgtcggtcccacgtcgatagaccccacccaccagtgagtagcgtgtacgtattcgggggtgacggacgtgtcgccgtcgtcttgctagtcccattcccatctgagccacacatctctgaacaaaaaaaaggagggaggcctccacgcacatccccctccgtgccacccgccccaaaccctcgcgccgcctccgagacagccgccgcaaccatggccaccgccgccgccgcgtctaccgcgctcactggcgccactaccgctgcgcccaaggcgaggcgccgggcgcacctcctggccacccgccgcgccctcgccgcgcccatcaggtgctcagcggcgtcacccgccatgccgatggctcccccggccaccccgctccggccgtggggccccaccgagccccgcaagggtgctgacatcctcgtcgagtccctcgagcgctgcggcgtccgcgacgtaagtttctgcttctacctttgatatatatataataattatcattaattagtagtaatataatatttcaaatatttttttcaaaataaaagaatgtagtatatagcaattgcttttctgtagtttataacttcgtatagcatacattatacgaagttatacttttctaatatatgaccaaaatttgttaccgaattcaggcgacccatcgctgctttgtctacatcatgttcttcatcatcctccccaggcgacgcgtgctgctgttcttattcagactaccgttcgagtgactgcatggcgtacatctttctgcatcgactttgtacggctacatcgaacatatacacgagatgtctcgtgtgaatagagtcactaatgccttaagcatcggttactccgtagggtacattctgttcttcttatttgtgcatatttttattgttgtttactgattatacgagtagttatacatacatgcacatacatatcatcacatatatcacaatatttttctaaattaaattaaaactaaaaatgactaaatttctaacaccaacgacattgtaatgttttctccaacaactttacctattctacattgttctatttcgaatttcactctataaacaacatagtctacaatggaaaacagtgctttgtacgactatatacgcgatgtgtggctacaacataagacaatatagtcgtttgaagattgaacctatatatcggtacggttaatccgtctatgtacgtgggcatgacgaacacccgtgataacgaaggattaacgtgcacaatcataaatccaaagtaggagcggtgcatgatgagaatcgctctcagtactcgacataatgaaccttacgaggtacaacaggcaggcaggcagggaccaggggccgcctttatttcaggctcgctggccccacgggcgtgctgcgtgcacgaagggcactaccccaacctctcaccgaaaaccgcgctggatcggcaaatcaaacgaggtggtgccccgtgcccactctccacgtccacggcaccatccctctgcagccgctcaccagccatgccgtgtcgcggaacggcacaaccacccccaacccactcacgaaaccccgtcccggccgtgcccgtgtcggtccgcgctcggcaacgaggcggcccgcgctgctgagtcccctggacacccgacaccctgtcggccctttgtttattcatcccgaaatctcatctgcccccacggccgactgcgctgcgccgcccggatatatatacccatcgttatcgatcgactggggactctatcagtgatagagtctagaggatcgctcaggaaggccgctgagatagaggcatggcggccaatgcgggcggcggtggagcgggaggaggcagcggcagcggcagcgtggctgcgccggcggtgtgccgccccagcggctcgcggtggacgccgacgccggagcagatcaggatgctgaaggagctctactacggctgcggcatccggtcgcccagctcggagcagatccagcgcatcaccgccatgctgcggcagcacggcaagatcgagggcaagaacgtcttctactggttccagaaccacaaggcccgcgagcgccagaagcgccgcctcaccagcctcgacgtcaacgtgcccgccgccggcgcggccgacgccaccaccagccaactcggcgtcctctcgctgtcgtcgccgccgccttcaggcgcggcgcctccctcgcccaccctcggcttctacgccgccggcaatggcggcggatcggctgtgctgctggacacgagttccgactggggcagcagcggcgctgccatggccaccgagacatgcttcctgcaggactacatgggcgtgacggacacgggcagctcgtcgcagtggccacgcttctcgtcgtcggacacgataatggcggcggccgcggcgcgggcggcgacgacgcgggcgcccgagacgctccctctcttcccgacctgcggcgacgacggcggcagcggtagcagcagctacttgccgttctggggtgccgcgtccacaactgccggcgccacttcttccgttgcgatccagcagcaacaccagctgcaggagcagtacagcttttacagcaacagcaacagcacccagctggccggcaccggcaaccaagacgtatcggcaacagcagcagcagccgccgccctggagctgagcctcagctcatggtgctccccttaccctgctgcagggagtatgtgagagcaacgcgagctgccactgctcttcactggtaccgttaacagatcattcgacaaagcagcattagtccgttgatcggtggaagaccactcgtcagtgttgagttgaatgtttgatcaataaaatacggcaatgctgtaagggttgttttttatgccattgataatacactgtactgttcagttgttgaactctatttcttagccatgccaagtgcttttcttattttgaataacattacagcaaaaagttgaaagacaaaaaaaaaaacccccgaacagagtgctttgggtcccaagcttctttagactgtgttcggcgttccccctaaatttctccccctatatctcactcacttgtcacatcagcgttctctttccccctatatctccacgctctacagcagttccacctatatcaaacctctataccccaccacaacaatattatatactttcatcttcaactaactcatgtaccttccaatttttttctactaataattatttacgtgcacagaaacttagcaaggagagagagagcggggtgacccaccttgctagttggatattacctcttctcttcaaagtatccttgaacgctcaccggttatcaaatctctacactatagctctgtagtcttgctagatagttagttctttagctctcggtgaccaagcttggcgcgatcaagcttatcgataccgtcgacctcgaagcttggtcacccggtccgggcctagaaggccagcttcaagtttgtacaaaaaagcaggctccggccagaatggcccggaccgggttaccgaattcttaccctagctccctgcggctgttacgcggtcccccatcaatcttctgttcttgcggttgtagcctgtgtaacagtgctagagtatgtatgataaataggttttaagtctgcttacatgacattttttattgtggaagagacatataaaaattagagagagtggttctcatgcaacggcggacggcccggtgctaaaagagcttcaagacaaaataatgaaacaggaagagagtagatttatctaagagccaactttattatatgaatgtgtttattgttggctttagatgatatggtaaggagttagagctaataatagataggctctattattattattattaattaaactcgctctaaggaggaaagtgggaggaagggacgaggacgaagactactggaagcatcgtgcatggatgatggatgtggtgtctcttaatgtaggtggccggaggatgtacgtgttaattgcgcgataagcactcagatccaaccgcaaactacctccacactgacacactgatagagagaaagagagacctccgacgactgccgccgcagatgagccacgtacgtatacgacgtctgccggccggctcaggctgccgccatcaccctgctcgaaagtcgcgttaggcggcgccagctacataggagtatctagtctagccagttagtatactactactgcgctgatgatgaattaactctgcatagatactgtacttgcctccctccaacacccaaccacctcctgctcggctcttaataacttggacacggatcgatgccatccaaggaagaacacgacgacgacgacggaacatccaccatgcaagcttgcatccatacgccgatacgcgtgcatccatccatccaccattatttccattttccaccgatcacacgtacacaggcctatttaaggagcgacatcccactgcaactctcctcaccactcatcaccagctagctctagcaaagcacttgccatctaccgaccgccgcattccaaacagcccgacgagctagcagagcggcaggcacctccctcctcaaggaacccatggccactgtgaacaactggctcgctttctccctctccccgcaggagctgccgccctcccagacgacggactccacactcatctcggccgccaccgccgaccatgtctccggcgatgtctgcttcaacatcccccaagattggagcatgaggggatcagagctttcggcgctcgtcgcggagccgaagctggaggacttcctcggcggcatctccttctccgagcagcatcacaaggccaactgcaacatgatacccagcactagcagcacagtttgctacgcgagctcaggtgctagcaccggctaccatcaccagctgtaccaccagcccaccagctcagcgctccacttcgcggactccgtaatggtggcttcctcggccggtgtccacgacggcggtgccatgctcagcgcggccgccgctaacggtgtcgctggcgctgccagtgccaacggcggcggcatcgggctgtccatgattaagaactggctgcggagccaaccggcgcccatgcagccgagggtggcggcggctgagggcgcgcaggggctctctttgtccatgaacatggcggggacgacccaaggcgctgctggcatgccacttctcgctggagagcgcgcacgggcgcccgagagtgtatcgacgtcagcacagggtggagccgtcgtcgtcacggcgccgaaggaggatagcggtggcagcggtgttgccggcgctctagtagccgtgagcacggacacgggtggcagcggcggcgcgtcggctgacaacacggcaaggaagacggtggacacgttcgggcagcgcacgtcgatttaccgtggcgtgacaaggcatagatggactgggagatatgaggcacatctttgggataacagttgcagaagggaagggcaaactcgtaagggtcgtcaagtctatttaggtggctatgataaagaggagaaagctgctagggcttatgatcttgctgctctgaagtactggggtgccacaacaacaacaaattttccagtgagtaactacgaaaaggagctcgaggacatgaagcacatgacaaggcaggagtttgtagcgtctctgagaaggaagagcagtggtttctccagaggtgcatccatttacaggggagtgactaggcatcaccaacatggaagatggcaagcacggattggacgagttgcagggaacaaggatctttacttgggcaccttcagcacccaggaggaggcagcggaggcgtacgacatcgcggcgatcaagttccgcggcctcaacgccgtcaccaacttcgacatgagccgctacgacgtgaagagcatcctggacagcagcgccctccccatcggcagcgccgccaagcgcctcaaggaggccgaggccgcagcgtccgcgcagcaccaccacgccggcgtggtgagctacgacgtcggccgcatcgcctcgcagctcggcgacggcggagccctggcggcggcgtacggcgcgcactaccacggcgccgcctggccgaccatcgcgttccagccgggcgccgccagcacaggcctgtaccacccgtacgcgcagcagccaatgcgcggcggcgggtggtgcaagcaggagcaggaccacgcggtgatcgcggccgcgcacagcctgcaggacctccaccacctgaacctgggcgcggccggcgcgcacgactttttctcggcagggcagcaggccgccgccgctgcgatgcacggcctgggtagcatcgacagtgcgtcgctcgagcacagcaccggctccaactccgtcgtctacaacggcggggtcggcgacagcaacggcgccagcgccgtcggcggcagtggcggtggctacatgatgccgatgagcgctgccggagcaaccactacatcggcaatggtgagccacgagcaggtgcatgcacgggcctacgacgaagccaagcaggctgctcagatggggtacgagagctacctggtgaacgcggagaacaatggtggcggaaggatgtctgcatgggggactgtcgtgtctgcagccgcggcggcagcagcaagcagcaacgacaacatggccgccgacgtcgggcatggcggcgcgcagctcttcagtgtctggaacgacacttaagcgtacctagtggtacctgacatcttatagtctgcaacctctcgtgtctgaattcctatctttatcaagtgttattgcttccacgactataggacagctttcgtcgaaagcttttgctcatgtgatctcgaaggattcatctagtctgatttttcgtgacttgtatcggttttattggattcatccaacatatatcaataaaaaatgagttgtgtttcctttcttcctagttcagttaaaattatttccctcctgcgcttgtgctgtaattgtctgtgtacctgttgtttgtgactgtgttagttcccttggatatgatttcgtatttgatatgtacatggagatagcttagcttcattattggagtatgaagttagtatgacatagtcactctcctggaaaattgacactgcaaaccatatttttattctgaaccacaaatcctagtcagtccgctggcatatgccgtccgtttgctgaatccagaacgtgggtttggagatgtacggctgagatgcctctatgcgaaggggatttcgtggtgaaacgagatgggagtagagcaacgcccgtggaagatgcttcaaacttccacacttttgagcaacgatcggcagtagtaaggtagacgatttcaagatcaaagcatatgaagataaacaacatcaacaacaaaatttgttggggttctatagagagaaacagagctacatacatacactgttttgtatctaccatctgagatgatgaaaagatgaaaaactaaagaatgccccggcgccaacgccaggacacgccgcgcgcgcgtcacccgagccatctcttgacccagccggcgctgtatatttacacacgttgcagcatcgatcaccacctgttcgatcgcgtcgccgtcaccgggatctgagtcgaaacctagacttgtccatcttctggattggccaacttaattaatgtatgaaataaaaggatgcacacatagtgacatgctaatcactataatgtgggcatcaaagttgtgtgttatgtgtaattactagttatctgaataaaagagaaagagatcatccatatttcttatcctaaatgaatgtcacgtgtctttataattctttgatgaaccagatgcatttcattaaccaaatccatatacatataaatattaatcatatataattaatatcaattgggttagcaaaacaaatctagtctaggtgtgttttgcgaatgcgaccttcttatgtgcttctagtctccaaatgtggttgatagttattttgctctaagatcaacagtaatgaagtataaatcatcgttgtggtgtgctactcggttaattgagcattaacacacacaaacatgacgaggatggtataatctccaaaaatgtgtactttgttaggtgggaccctatagccttgattaatgtgctatgttaggcatgcctggaaacgtgtgacgcatatgttttgtgaacctgttgatattatatgtgcttttatattaccatattttattaaaatactaatatttattactagtaagatataacattctatctagcttaaaaactaaccataaatattccataataactagatttaccaaactaatatactaaatatacataataaatacaaaattaacaagacaataatcaatatttatgagcttaatatatttagacattatggttggtcgacgataatcatgctaacttttcgtaattgcttgattgaaatatgcttagaataatgcctctttgttctacatggcaaatagggaccattatggtgtaacaccctgggaaccacaaacaccccgaaatgctactaaactacacaactaaccttcatatataaaatttcgacagcatctcctttgaaaatttgcatagacgtggaagcaacagagtataaacagatatcatgataagaaaacatactagacattaataatctgctagaaatgggaagaatcctaacttgacgactgcgtaactgactagagtcacacttagctgaccctagtcacttacaactgacttcgtgtcctagatcgatgggccctggccgaagcttggtcacccggtccgggcctagaaggccagcttcaagtttgtaccctggagcttgccgagtgccatccttggacactcgataaagtatattttattttttttattttgccaaccaaactttttgtggtatgttcctacactatgtagatctacatgtaccattttggcacaattacatatttacaaaaatgttttctataaatattagatttagttcgtttatttgaatttcttcggaaaattcacatttaaactgcaagtcactcgaaacatggaaaaccgtgcatgcaaaataaatgatatgcatgttatctagcacaagttacgaccgatttcagaagcagaccagaatcttcaagcaccatgctcactaaacatgaccgtgaacttgttatctagttgtttaaaaattgtataaaacacaaataaagtcagaaattaatgaaacttgtccacatgtcatgatatcatatatagaggttgtgataaaaatttgataatgtttcggtaaagttgtgacgtactatgtgtagaaacctaagtgacctacacataaaatcatagagtttcaatgtagttcactcgacaaagactttgtcaagtgtccgataaaaagtactcgacaaagaagccgttgtcgatgtactgttcgtcgagatctctttgtcgagtgtcacactaggcaaagtctttacggagtgtttttcaggctttgacactcggcaaagcgctcgattccagtagtgacagtaatttgcatcaaaaatagctgagagatttaggccccgtttcaatctcacgggataaagtttagcttcctgctaaactttagctatatgaattgaagtgctaaagtttagtttcaattaccaccattagctctcctgtttagattacaaatggctaaaagtagctaaaaaatagctgctaaagtttatctcgcgagattgaaacagggccttaaaatgagtcaactaatagaccaactaattattagctattagtcgttagcttctttaatctaagctaaaaccaactaatagcttatttgttgaattacaattagctcaacggaattctctgtttttctaaaaaaaaactgcccctctcttacagcaaattgtccgctgcccgtcgtccagatacaatgaacgtacctagtaggaactcttttacacgctcggtcgctcgccgcggatcggagtccccggaacacgacaccactgtggaacacgacaaagtctgctcagaggcggccacaccctggcgtgcaccgagccggagcccggataagcacggtaaggagagtacggcgggacgtggcgacccgtgtgtctgctgccacgcagccttcctccacgtagccgcgcggccgcgccacgtaccagggcccggcgctggtataaatgcgcgccacctccgctttagttctgcatacagccaacccaaggatgtccaacctgctcacggttcaccagaaccttccggctcttccagtggacgcgacgtccgatgaagtcaggaagaacctcatggacatgttccgcgacaggcaagcgttcagcgagcacacctggaagatgctgctctccgtctgccgctcctgggctgcatggtgcaagctgaacaacaggaagtggttccccgctgagcccgaggacgtgagggattaccttctgtacctgcaagcgcgaggtttgtttctgcttctacctttgatatatatataataattatcattaattagtagtaatataatatttcaaatatttttttcaaaataaaagaatgtagtatatagcaattgcttttctgtagtttataagtgtgtatattttaatttataacttttctaatatatgaccaaaacatggtgatgcctaggtctggcagtgaagaccatccagcaacaccttggacaactgaacatgcttcacaggcgctccggcctcccgcgccccagcgactcgaacgccgtgagcctcgtcatgcgccgcatcaggaaggaaaacgtcgatgccggcgaaagggcaaagcaggccctcgcgttcgagaggaccgatttcgaccaggtccgcagcctgatggagaacagcgacaggtgccaggacattaggaacctggcgttcctcggaattgcatacaacacgctcctcaggatcgcggaaattgcccgcattcgcgtgaaggacattagccgcaccgacggcggcaggatgcttatccacattggcaggaccaagacgctcgtttccaccgcaggcgtcgaaaaggccctcagcctcggagtgaccaagctcgtcgaacgctggatctccgtgtccggcgtcgcggacgacccaaacaactacctcttctgccgcgtccgcaagaacggggtggctgcccctagcgccaccagccaactcagcacgagggccttggaaggtattttcgaggccacccaccgcctgatctacggcgcgaaggatgacagcggtcaacgctacctcgcatggtccgggcactccgcccgcgttggagctgctagggacatggcccgcgccggtgtttccatccccgaaatcatgcaggcgggtggatggacgaacgtgaacattgtcatgaactacattcgcaaccttgacagcgagacgggcgcaatggttcgcctcctggaagatggtgactgagctagacccagctttcttgtacaaagtggccgttaacggatccagacttgtccatcttctggattggccaacttaattaatgtatgaaataaaaggatgcacacatagtgacatgctaatcactataatgtgggcatcaaagttgtgtgttatgtgtaattactagttatctgaataaaagagaaagagatcatccatatttcttatcctaaatgaatgtcacgtgtctttataattctttgatgaaccagatgcatttcattaaccaaatccatatacatataaatattaatcatatataattaatatcaattgggttagcaaaacaaatctagtctaggtgtgttttgcgaattgcggcaagctgttaccgaattcctgcccttaaggccaattgttcaagattcattcaacaattgaaacatctcccatgattaaatcagtataaggttgctatggtcttgcttgacaaagtttttttttgagggaatttcaactaaatttttgagtgaaactatcaaatactgattttaaaaaatttttataaaaggaagcgcagagataaaaggccatctatgctacaaaagtacccaaaaatgtaatcctaaagtatgaattgcattttttttttgtttggacgaaaggaaaggagtattaccacaagaatgatatcatcttcatatttagatcttttttgggtaaagcttgagattctctaaatatagagaaatcagaagaaaaaaaaaccgtgttttggtggttttgatttctagcctccacaataactttgacggcgtcgacaagtctaacggacaccaagcagcgaaccaccagcgccgagccaagcgaagcagacggccgagacgttgacaccttcggcgcggcatctctcgagagttccgctccggcgctccacctccaccgctggcggtttcttattccgttccgttccgcctcctgctctgctcctctccacaccacacggcacgaaaccgttacggcaccggcagcacccagcacgggagaggggattcctttcccaccgttccttccctttccgccccgccgctataaatagccagccccatccccagcttttttccccaatctcatctcctctctcctgttgttcggagcacacgcacaatccgatcgatccccaaatccccttcgtctctcctcgcgagcctcgtggatcccagcttcaaggtacggcgatcgatcatcccccctccttctctctaccttcttttctctagactacatcggatggcgatccatggttagggcctgctagtttcccttcctgttttgtcgatggctgcgaggcacaatagatctgatggcgttatgacggctaacttgtcatgttgttgcgatttatagtccctttaggagatcagtttaatttctcggatggttcgagatcggtggtccatggttagtaccctaagatccgcgctgttagggttcgtagatggaggcgacctgttctgattgttaacttgtcagtacctgggaaatcctgggatggttctagctcgtccgcagatgagatcgatttcatgatcctctgtatcttgtttcgttgcctaggttccgtctaatctatccgtggtatgatgtagatgttttgatcgtgctaactacgtcttgtaaagttaattgtcaggtcataatttttagcatgcctttttttttgtttggttttgtctaattgggctgtcgttctagatcagagtagaagactgttccaaactacctgctggatttattgaacttggatctgtatgtgtgtcacatatcttcataaattcatgattaagatggattgaaatatcttttatctttttggtatggatagttctatatgttggtgtggctttgttagatgtatacatgcttagatacatgaagcaacgtgctgctactgtttagtaattgctgttcatttgtctaataaacagataaggatatgtatttatgttgctgttggttttgctggtactttgttggatacaaatgcttcaatacagaaaacagcatgctgctacgatttaccatttatctaatcttatcatatgtctaatctaataaacaaacatgcttttaaattatcttcatatgcttggatgatggcatacacagcggctatgtgtggttttttaaatacccagcatcatgggcatgcatgacactgctttaatatgctttttatttgcttgagactgtttcttttgtttatactgaccctttagttcggtgactcttctgcaggtcgactttaacttagcctaggatccatggcccagtccaagcacggcctgaccaaggagatgaccatgaagtaccgcatggagggctgcgtggacggccacaagttcgtgatcaccggcgagggcatcggctaccccttcaagggcaagcaggccatcaacctgtgcgtggtggagggcggccccttgcccttcgccgaggacatcttgtccgccgccttcatgtacggcaaccgcgtgttcaccgagtacccccaggacatcgtcgactacttcaagaactcctgccccgccggctacacctgggaccgctccttcctgttcgaggacggcgccgtgtgcatctgcaacgccgacatcaccgtgagcgtggaggagaactgcatgtaccacgagtccaagttctacggcgtgaacttccccgccgacggccccgtgatgaagaagatgaccgacaactgggagccctcctgcgagaagatcatccccgtgcccaagcagggcatcttgaagggcgacgtgagcatgtacctgctgctgaaggacggtggccgcttgcgctgccagttcgacaccgtgtacaaggccaagtccgtgccccgcaagatgcccgactggcacttcatccagcacaagctgacccgcgaggaccgcagcgacgccaagaaccagaagtggcacctgaccgagcacgccatcgcctccggctccgccttgccctccggactcagatctcgatagggtaccaatggccagttaacagatccagctgctgctgttctagggttcacaagtctgcctatttgtcttccccaatggagctatggttgtctggtctggtccttggtcgtgtcccgtttcattgtgtactatttacctgtaatgtgtatccttaagtctggtttgatggtgtctgaaacgttttgctgtggtagagcagcatggaagaactataatgaataagtgatccctaatcattgtgtccaaattttgcttctgctatacccttttgtgctgtttcttatgttttgcttaaaaatttgatctgacaaacaaatttgtctaaattatgctcttgttctgactgtgtactgtacacatttgtattgctaccggtttggcacatagttttctctttgattgcagatcaaacccttctgattgcagattgcttggctatggctgatgtgctcactgttcttctttagcttgtatattgctgatggtggcttggctacggctgaaaaagttgctgctgcgccgacttggcaactgttgctccagtaatgctttgtcctctcttcctagccgccgacttggcacttggcagctgttgctcctgtaatgcgttgttatctcttatctcttgagatgtactatgattttgaggctgtttgacttgtgccagattgccagtgctgatgctatattatctcaggtttttatgctagtatatgttttactgtgtgctgcctgtgtcgagttacgtaatctattgaaccgctatgcgtgttgatgccctgttgttgcttgccagattgatgcccctgttgcttgcagcttgcaagctgtagtgaaatcctaaaattcgaaaccaaatctattctgaacttttgaagatctgtgatgtccggaagaaaagattcaaacagataaacgggactctccagaatctataaaataaatgatcgacaaacgctttgctttggtaggcttcctagttagttagcggaccgaagcttcggtccgggcctagaaggccagcttcggccgccccatttcaaatatttttttcaaaataaaagaatgtagtatatagcaattgcttttctgtagtttataacttcgtatagcatacattatacgaagttatacttttctaatatatgaccaaaatttgttgatgtgcaggtcttcgcctaccccggcggcgcgtccatggagatccaccaggcactcacccgctcccccgtcatcgccaaccacctcttccgccacgagcaaggggaggcctttgccgcctccggctacgcgcgctcctcgggccgcgtcggcgtctgcatcgccacctccggccccggcgccaccaacctagtctccgcgctcgccgacgcgctgctcgattccgtccccatggtcgccatcacgggacaggtggcgcgacgcatgattggcaccgacgccttccaggagacgcccatcgtcgaggtcacccgctccatcaccaagcacaactacctggtcctcgacgtcgacgacatcccccgcgtcgtgcaggaggctttcttcctcgcctcctctggtcgaccagggccggtgcttgtcgacatccccaaggacatccagcagcagatggcggtgcctgtctgggacaagcccatgagtctgcctgggtacattgcgcgccttcccaagccccctgcgactgagttgcttgagcaggtgctgcgtcttgttggtgaatcgcggcgccctgttctttatgtgggcggtggctgcgcagcatctggtgaggagttgcgacgctttgtggagctgactggaatcccggtcacaactactcttatgggcctcggcaacttccccagcgacgacccactgtctctgcgcatgctaggtatgcatgggacggtgtatgcaaattatgcagtggataaggccgatctgttgcttgcacttggtgtgcggtttgatgatcgcgtgacagggaagattgaggcttttgcaagcagggctaagattgtgcacgttgatattgatccggctgagattggcaagaacaagcagccacatgtgtccatctgtgcagatgttaagcttgctttgcagggcatgaatgctcttcttgaaggaagcacatcaaagaagagctttgactttggctcatggaacgatgagttggatcagcagaagagggaattcccccttgggtataaaacatctaatgaggagatccagccacaatatgctattcaggttcttgatgagctgacgaaaggcgaggccatcatcggcacaggtgttgggcagcaccagatgtgggcggcacagtactacacttacaagcggccaaggcagtggttgtcttcagctggtcttggggctatgggatttggtttgccggctgctgctggtgcttctgtggcaaacccaggtgtcactgttgttgacatcgatggagatggtagctttctcatgaacgttcaggagctagctatgatccgaattgagaacctcccagtgaaggtctttgtgctaaacaaccagcacctggggatggtggtgcagttggaggacaggttctataaggccaacagagcgcacacatacttgggaaacccagagaatgaaagtgagatatatccagatttcgtgacgatcgccaaagggttcaacattccagcggtccgtgtgacaaagaagaacgaagtccgcgcagcgataaagaagatgctcgagactccagggccgtacctcttggatataatcgtcccacaccaggagcatgtgttgcctatgatccctagtggtggggctttcaaggatatgatcctggatggtgatggcaggactgtgtactgatgactagctagtcagttaacagatctgccagatcctcggtgtacaaataacccgtcttatcctatgagacgggccggcgtcagtgtgttctggaggaatttttatgtcagagcctttttctttgtgtgcttgatgtagatgccaagggaagcttattggctgttgaagcttgatgcaaaataaattatggaactctgttttttgtttatctaataataactagcaaatatgcttccattgcattgaaactaacagccttttgtgtttccaagttttattttgtgacaatgtcatctatttcaattagttgtggaatcggaaacttgcaggactaacttggaaactccaatccctcagcatcctggactttttcctggtgtaatccatgtagatattattttaatcatcattttagttctggaggtttttccatctccggttttgctcccctttcttcaaaaaaaaaaaaaaaatgccgtaggcgccgcaacgcccacctgttgttcaaactcatgggcacgagtggctcgaagattttatacaacaattgctgtagtttcaccgttgctggtgaagaagcatttttttaaaaaaatatagtggtattcattttaattagtttagttgtgcagcgagcaaaatttggacatgctctgctcggaatctgatcgacctagacacagattagcagcagtagctttgtcatctgttccaagagttgcgatctgatagaagaaaaaaaaaccttcccttcaatgtaaaaccgaaactaacaagaaagaagcacagtgccgtttaggcaagtatggagtacgtattaagcatgtagaaggccatgcatgaaccactaacaagaaagaagcgcagtgccattcaggcaagcataagcatgtagattggcatgcatgaacaactaacagtagatcgtctctggtctgattagaagttttttgggaagccaagaaatcatgtacaactggttccatctcaaattccgtggcaaaaagaggcctaagcaacataaagctttccactggttgccatatatgatttgggcatttcactttgatcttaatgggccttgtaaagcccaagactcatgattatctttagttgatgctcttaattaggtgtgggcaaataattcaaactgtatgtacccgaccaaaaccaaagcaaaaataatcgaaccaaaccgaaaatttaaaaataaccgaatgaaaactaaatcctataactgaaagaactgaaaccgaatcaaaatatttaatgtaaccaaaaatatccgaaatataattatattgtcaaaaatattaataatttctagattaaataattaaaaatacttaaaaatttatataaaatagtaaaaatactcgaaaataaccacaaatattcaaaaacaaccgaaatatcccaaaatattcaaagcaaaataaccgaatggataccaaattttaaaaccgaaaaaactggaacaaaaccaaaatcgaaccaaaatttcaaaaatcgaataaatactaaactttagaacaaaaaaaaacgataaccgaatgtatacgaaccaaagccgaattagataaccgaacgtccaggactactcttaatctttccgccacttatgatttgggctattactttgtttataatgagccttttcaagctcaagttcatgattgtccgtgagatgagaaactgacttgttggattcgaaaccctagctagtattggttaatacttaatacataaatgacctgcattgacatcatcatccaagaaaataaaaattgtatgcttgagatatttagttttcctagctaggttttctttattttagtaccgaatctttaggtgtgccacgttaatttagacccattttttcatacttaccaactgagtctagtttaatcatgactataatcgtataaaatgattcagtcgacgtcattgcgaacgtatataaaatcatccaaattgacgtcattccaaagaggtaagcatgcttatctaagagtccgagcatactaaacaagacgacattttatttgcactccaaatcaaattttgtattgcctaaagaaaaacaatcaaactcaagtttcttaaaattaatttcattcaaactaatcactttcaatatctcacatattattcatgccatttctatttgtctaaacatgatttaaaaaaaaaagtaaaatacaaagattactatgcaaaaactctataaaaaaaaattcaaatttcttatttatttgtgacatcaaattttcaaaataatttttttaattatcggttgatccggtcagtcgataaaaacataaactttcagcgaccgttaaaactttcctactaccgatttagagaaaatcttagcttgaaacgtaattgtaacctgccttcatgcaagtcgcaagatatgtcatcctaagttgtatatgttttctcaaaagatgtatttacttgagaaaatacgtttcaacgttgatggacaaccaattaagaatcaagcacctttcgtaatcaatttaggcttatcgtctaaggtatactgatttacgacagttgactagacttataaggaacaaaataatagaatagtttctaaacacttcacctaatcatagagactaagatggtaattcgtaaacgacaaagcctagtgacactgtccattgtaaaattccacatcatattagtattaaacatatacatgtagtttcctgaacacatgtagtatcaaacacacttcgtggcttcttcctcgaaacctgcggccgctcattaattaagtcatctagttgaaggatcgctatcaactttgtatagaaaagttgggccgaattcgagctcggtacggccagaatggcccggaccgaagcttaccggtttgatcatttgttcatctcacatgatagttctaacaatatgcacaaattctatacatatctctcgtagttccataaactacgagagagatataggttttatgaacaaatttatttttagtttatcatatgaagaaatgttcaaaatataaaatgtacatcatgatgagttatacaaatttgtagttgaaaactttttcatttgaattaatttactgctttaaaatgtgtatgcagttggcttgatgtgagacaataagctaaaccacgggttttccatgggtttccacccaattacgggttggtttgggatcaataatgttattggatgggttgggtttaactttcctctagtatttttggttgggtgtgggatggatatcaaagtaattagatttgggtatgggtgggagcggattggattttttgccattagcaggcctatgcacttgtcggcgcacacggctggcgcgtgcacacaccttatcggcagacgccgccgctgctgctgctgatgcttcttcttcttccaccgattgattgagatccaaggaaatgctgggcgcgtttttaaactggctgatcggcttcgtcccatgatctgagatttccttttcagactgttgtatatgtagcggcgacatggataggatatgtatggaccgttttaattaatactaaatatcaatggtttaactcttcactattactcctagctagatgtgaaagctcgccctggaatgcacatgaacaactacaccgagttgggcagtttggcaatgcatgcagttcaagagccacgccggttaacccttcactttgtagttattgcctgcattttgtaaatttggtgtgaacttaattctaatctgtaattctgtatagagaatggtgcatgtactgaactcctgactgatcaaaacgtggggtccactttcctcgccgaaaaagaaaagagaaaaaaaggtttattgtccactttattaaaaactggacttatatatatgcttggaacaaatacttagggggtgtttggttttaggaatctctcaatctaaaataaggtggtgtatcataggtttattactcaaatttggtgggatgatctcattgctcatattagtactaactaactaactatgaggaatgagatggtgatggatcaacccattacattctacaaaccaaacaaaaaagtgaggagtgagaagatggtgaactagctcatttctcaaaccaaacactctattaataaaccaatcgcgtagctaataaatatatgtaacctcgacattctagctacagcttgtggttggtagaaaagcaaatcatgctcaaaataatgtgctccgaaacttcattacatttttcttcacttgagtgtacatacattttttttcccttggccctcttatccttaactaagaagcataaaacgggatttctcagccagttcttagcttctcttataaatacagaccttgtacaacactttcacctcctctcaggtggccaggatattttttctggccccttcctgccctcttcacactgacccatgtgttgttctatccctggaaagctatacctccttacccctatcagcttctcctcacatctcctctcgtcgccacccatgctatcaccgctctgatcacaagcaaggcaaaccctcactgttctatcaacgcccctcccttagctagcctaggcgcgccatttaaatatgcgcgaaattctgcatattcagggcggccagtgcggcaaccagattggcagcaaattttgggaagtggtgtgcgatgaacatggcattgatccgaccggccgctatatgggcaccagcgatgtgcagctggaacgcgtgaacgtgtattataacgaagcgagctgcggccgctttgtgccgcgcgcggtgctgatggatctggaaccgggcaccatggatgcggtgcgcaccggcccgtatggccagatttttcgcccggataactttgtgtttggccagagcggcgcgggcaacaactgggcgaaaggccattataccgaaggcgcggaactgattgatagcgtgctggatgtggtgcgcaaagaagcggaaaactgcgattgcctgcagggctttcaggtgtgccatagcctgcacgctggacaccgggaggcaatgcgcgaaattctgcatattcagggcggccagtgcggcaaccagattggcagcaaattttgggaagtggtgtgcgatgaacatggcattgatccgaccggccgctatatgggcaccagcgatgtgcagctggaacgcgtgaacgtgtattataacgaagcgagctgcggccgctttgtgccgcgcgcggtgctgatggatctggaaccgggcaccatggatgcggtgcgcaccggcccgtatggccagatttttcgcccggataactttgtgtttggccagagcggcgcgggcaacaactgggcgaaaggccattataccgaaggcgcggaactgattgatagcgtgctggatgtggtgcgcaaagaagcggaaaactgcgattgcctgcagggctttcaggtgtgccatagcctgatttaaatgcccgggcgatcgctcgaggcgtacctagtggtaccacatggttaacctagacttgtccatcttctggattggccaacttaattaatgtatgaaataaaaggatgcacacatagtgacatgctaatcactataatgtgggcatcaaagttgtgtgttatgtgtaattactagttatctgaataaaagagaaagagatcatccatatttcttatcctaaatgaatgtcacgtgtctttataattctttgatgaaccagatgcatttcattaaccaaatccatatacatataaatattaatcatatataattaatatcaattgggttagcaaaacaaatctagtctaggtgtgttttgcgaatgcggccgccaccgcggtggagctcgaattccggtccgggcctagaaggccagcttcaagtttgtacaaaaaagcaggctccggccagaatggcccggaccgggttaccgaattcgagctcggtaccctgggatccgatatcgatgggccctggccgaagcttggtcacccggtccgggcctagaaggccgatctcccgggcacccagctttcttgtacaaagtggccgttaacggatcggccagaatggcccggaccgaagcttgcatgcctgcagtgcagcgtgacccggtcgtgcccctctctagagataatgagcattgcatgtctaagttataaaaaattaccacatattttttttgtcacacttgtttgaagtgcagtttatctatctttatacatatatttaaactttactctacgaataatataatctatagtactacaataatatcagtgttttagagaatcatataaatgaacagttagacatggtctaaaggacaattgagtattttgacaacaggactctacagttttatctttttagtgtgcatgtgttctcctttttttttgcaaatagcttcacctatataatacttcatccattttattagtacatccatttagggtttagggttaatggtttttatagactaatttttttagtacatctattttattctattttagcctctaaattaagaaaactaaaactctattttagtttttttatttaataatttagatataaaatagaataaaataaagtgactaaaaattaaacaaataccctttaagaaattaaaaaaactaaggaaacatttttcttgtttcgagtagataatgccagcctgttaaacgccgtcgacgagtctaacggacaccaaccagcgaaccagcagcgtcgcgtcgggccaagcgaagcagacggcacggcatctctgtcgctgcctctggacccctctcgagagttccgctccaccgttggacttgctccgctgtcggcatccagaaattgcgtggcggagcggcagacgtgagccggcacggcaggcggcctcctcctcctctcacggcaccggcagctacgggggattcctttcccaccgctccttcgctttcccttcctcgcccgccgtaataaatagacaccccctccacaccctctttccccaacctcgtgttgttcggagcgcacacacacacaaccagatctcccccaaatccacccgtcggcacctccgcttcaaggtacgccgctcgtcctcccccccccccctctctaccttctctagatcggcgttccggtccatgcatggttagggcccggtagttctacttctgttcatgtttgtgttagatccgtgtttgtgttagatccgtgctgctagcgttcgtacacggatgcgacctgtacgtcagacacgttctgattgctaacttgccagtgtttctctttggggaatcctgggatggctctagccgttccgcagacgggatcgatttcatgattttttttgtttcgttgcatagggtttggtttgcccttttcctttatttcaatatatgccgtgcacttgtttgtcgggtcatcttttcatgcttttttttgtcttggttgtgatgatgtggtctggttgggcggtcgttctagatcggagtagaattctgtttcaaactacctggtggatttattaattttggatctgtatgtgtgtgccatacatattcatagttacgaattgaagatgatggatggaaatatcgatctaggataggtatacatgttgatgcgggttttactgatgcatatacagagatgctttttgttcgcttggttgtgatgatgtggtgtggttgggcggtcgttcattcgttctagatcggagtagaatactgtttcaaactacctggtgtatttattaattttggaactgtatgtgtgtgtcatacatcttcatagttacgagtttaagatggatggaaatatcgatctaggataggtatacatgttgatgtgggttttactgatgcatatacatgatggcatatgcagcatctattcatatgctctaaccttgagtacctatctattataataaacaagtatgttttataattattttgatcttgatatacttggatgatggcatatgcagcagctatatgtggatttttttagccctgccttcatacgctatttatttgcttggtactgtttcttttgtcgatgctcaccctgttgtttggtgttacttctgcaggtcgactttaacttagcctaggatccatggcctcctccgagaacgtcatcaccgagttcatgcgcttcaaggtgcgcatggagggcaccgtgaacggccacgagttcgagatcgagggcgagggcgagggccgcccctacgagggccacaacaccgtgaagctgaaggtgaccaagggcggccccctgcccttcgcctgggacatcctgtccccccagttccagtacggctccaaggtgtacgtgaagcaccccgccgacatccccgactacaagaagctgtccttccccgagggcttcaagtgggagcgcgtgatgaacttcgaggacggcggcgtggcgaccgtgacccaggactcctccctgcaggacggctgcttcatctacaaggtgaagttcatcggcgtgaacttcccctccgacggccccgtgatgcagaagaagaccatgggctgggaggcctccaccgagcgcctgtacccccgcgacggcgtgctgaagggcgagacccacaaggccctgaagctgaaggacggcggccactacctggtggagttcaagtccatctacatggccaagaagcccgtgcagctgcccggctactactacgtggacgccaagctggacatcacctcccacaacgaggactacaccatcgtggagcagtacgagcgcaccgagggccgccaccacctgttcctgtagggtaccacatggttaacctagacttgtccatcttctggattggccaacttaattaatgtatgaaataaaaggatgcacacatagtgacatgctaatcactataatgtgggcatcaaagttgtgtgttatgtgtaattactagttatctgaataaaagagaaagagatcatccatatttcttatcctaaatgaatgtcacgtgtctttataattctttgatgaaccagatgcatttcattaaccaaatccatatacatataaatattaatcatatataattaatatcaattgggttagcaaaacaaatctagtctaggtgtgttttgcgaatgcggccgccaccgcggtggagctcgaattccggtccgggcctagaaggccagcttcggccgccccgggcaactttattatacaaagttgatagatcctcatgtcttcatcgtaagcttaaacaggccagaatggcctctggattcagcggcctagaaggccgaagtacttggtcttcctagtcgagtagatcacattcaagcttggtcacccggtccgtcaatattctgattccgatgacttcgtaggttcctagctcaagccgctcgtgtccaagcgtcacttacgattagctaatgattacggcatctaggaccgactagtggcgcgccgactagctagctaaggtaccgagctcgaattcattccgattaatcgtggcctcttgctcttcaggatgaagagctatgtttaaacgtgcaagcgctactagacaattcagtacattaaaaacgtccgcaatgtgttattaagttgtctaagcgtcaatttgtttacaccacaatatatcctgcca

SEQ ID NO: 35 - DNA, 28757 bp, Artificial Sequence
  RV042024
gtttacccgccaatatatcctgtcaaacactgatagtttaaactgaaggcgggaaacgacaatctgatcatgagcggagaattaagggagtcacgttatgacccccgccgatgacgcgggacaagccgttttacgtttggaactgacagaaccgcaacgttgaaggagccactcagcaagctggtacgattgtaatacgactcactatagggcgaattgagcgctgtttaaacgctcttcaactggaagagcggttacgctgtttaaacgctcttcaactggaagagcggttactaccggttcactagctagctgctaatcgagctagttaccctatgaggtgacatgaagcgctcacggttactatgacggttagcttcacgactgttggtggcagtagcgtacgacttagctatagttccggacttacccttaagcgatttaaatctgcggttaccgaattcgagctcggtaccctgggatctgcccttactttaacgcctctaaccaacacccctttatctttataaggaacaataaacagaatttgccccactgttctaaatcacctaataatatccccagctaaaaacaataaaggtttcctagaattaagacaagcatgactgttcctccaggagggtttggaacattgttgcagtcttgcagatacgggcgaagggtgagaaacagagcggagggctggaggtgacctcggtagtcgacgccggagttgagcttgacaacgacggggcggcccctgatggacttgaggaagtccgatggcgtcttcaccgtcccgccggcgcccgaggcgggcctgtcgctgccgccgccgccgctgctcatcttgcgcgctgtgcccccggcggtgtccctgtgttgcggatcgcgggtgggccaggtggatgcgagggcgacccgtttggactccggccggagccgccggatccctggtcggtgtcagtgccgtttactctgggccccacgtgtcagtaccgtctgtagatgacaacaacccgtcgtccacagtcatgtccaaaatatcctttcttcttttttttcgattcggatatctatcttccttttttttttccaaaaatcttcttgacgcaccagcgcgcacgtttgtggtaaacgccgacacgtcggtcccacgtcgatagaccccacccaccagtgagtagcgtgtacgtattcgggggtgacggacgtgtcgccgtcgtcttgctagtcccattcccatctgagccacacatctctgaacaaaaaaaaggagggaggcctccacgcacatccccctccgtgccacccgccccaaaccctcgcgccgcctccgagacagccgccgcaaccatggccaccgccgccgccgcgtctaccgcgctcactggcgccactaccgctgcgcccaaggcgaggcgccgggcgcacctcctggccacccgccgcgccctcgccgcgcccatcaggtgctcagcggcgtcacccgccatgccgatggctcccccggccaccccgctccggccgtggggccccaccgagccccgcaagggtgctgacatcctcgtcgagtccctcgagcgctgcggcgtccgcgacgtaagtttctgcttctacctttgatatatatataataattatcattaattagtagtaatataatatttcaaatatttttttcaaaataaaagaatgtagtatatagcaattgcttttctgtagtttataacttcgtatagcatacattatacgaagttatacttttctaatatatgaccaaaatttgttaccgaattcaggcgacccatcgctgctttgtctacatcatgttcttcatcatcctccccaggcgacgcgtgctgctgttcttattcagactaccgttcgagtgactgcatggcgtacatctttctgcatcgactttgtacggctacatcgaacatatacacgagatgtctcgtgtgaatagagtcactaatgccttaagcatcggttactccgtagggtacattctgttcttcttatttgtgcatatttttattgttgtttactgattatacgagtagttatacatacatgcacatacatatcatcacatatatcacaatatttttctaaattaaattaaaactaaaaatgactaaatttctaacaccaacgacattgtaatgttttctccaacaactttacctattctacattgttctatttcgaatttcactctataaacaacatagtctacaatggaaaacagtgctttgtacgactatatacgcgatgtgtggctacaacataagacaatatagtcgtttgaagattgaacctatatatcggtacggttaatccgtctatgtacgtgggcatgacgaacacccgtgataacgaaggattaacgtgcacaatcataaatccaaagtaggagcggtgcatgatgagaatcgctctcagtactcgacataatgaaccttacgaggtacaacaggcaggcaggcagggaccaggggccgcctttatttcaggctcgctggccccacgggcgtgctgcgtgcacgaagggcactaccccaacctctcaccgaaaaccgcgctggatcggcaaatcaaacgaggtggtgccccgtgcccactctccacgtccacggcaccatccctctgcagccgctcaccagccatgccgtgtcgcggaacggcacaaccacccccaacccactcacgaaaccccgtcccggccgtgcccgtgtcggtccgcgctcggcaacgaggcggcccgcgctgctgagtcccctggacacccgacaccctgtcggccctttgtttattcatcccgaaatctcatctgcccccacggccgactgcgctgcgccgcccggatatatatacccatcgttatcgatcgactggggactctatcagtgatagagtctagaggatcgctcaggaaggccgctgagatagaggcatggcggccaatgcgggcggcggtggagcgggaggaggcagcggcagcggcagcgtggctgcgccggcggtgtgccgccccagcggctcgcggtggacgccgacgccggagcagatcaggatgctgaaggagctctactacggctgcggcatccggtcgcccagctcggagcagatccagcgcatcaccgccatgctgcggcagcacggcaagatcgagggcaagaacgtcttctactggttccagaaccacaaggcccgcgagcgccagaagcgccgcctcaccagcctcgacgtcaacgtgcccgccgccggcgcggccgacgccaccaccagccaactcggcgtcctctcgctgtcgtcgccgccgccttcaggcgcggcgcctccctcgcccaccctcggcttctacgccgccggcaatggcggcggatcggctgtgctgctggacacgagttccgactggggcagcagcggcgctgccatggccaccgagacatgcttcctgcaggactacatgggcgtgacggacacgggcagctcgtcgcagtggccacgcttctcgtcgtcggacacgataatggcggcggccgcggcgcgggcggcgacgacgcgggcgcccgagacgctccctctcttcccgacctgcggcgacgacggcggcagcggtagcagcagctacttgccgttctggggtgccgcgtccacaactgccggcgccacttcttccgttgcgatccagcagcaacaccagctgcaggagcagtacagcttttacagcaacagcaacagcacccagctggccggcaccggcaaccaagacgtatcggcaacagcagcagcagccgccgccctggagctgagcctcagctcatggtgctccccttaccctgctgcagggagtatgtgagagcaacgcgagctgccactgctcttcactggtaccgttaacagatcattcgacaaagcagcattagtccgttgatcggtggaagaccactcgtcagtgttgagttgaatgtttgatcaataaaatacggcaatgctgtaagggttgttttttatgccattgataatacactgtactgttcagttgttgaactctatttcttagccatgccaagtgcttttcttattttgaataacattacagcaaaaagttgaaagacaaaaaaaaaaacccccgaacagagtgctttgggtcccaagcttctttagactgtgttcggcgttccccctaaatttctccccctatatctcactcacttgtcacatcagcgttctctttccccctatatctccacgctctacagcagttccacctatatcaaacctctataccccaccacaacaatattatatactttcatcttcaactaactcatgtaccttccaatttttttctactaataattatttacgtgcacagaaacttagcaaggagagagagagcggggtgacccaccttgctagttggatattacctcttctcttcaaagtatccttgaacgctcaccggttatcaaatctctacactatagctctgtagtcttgctagatagttagttctttagctctcggtgaccaagcttggcgcgatcaagcttatcgataccgtcgacctcgaagcttggtcacccggtccgggcctagaaggccagcttcaagtttgtacaaaaaagcaggctccggccagaatggcccggaccgggttaccgaattcttaccctagctccctgcggctgttacgcggtcccccatcaatcttctgttcttgcggttgtagcctgtgtaacagtgctagagtatgtatgataaataggttttaagtctgcttacatgacattttttattgtggaagagacatataaaaattagagagagtggttctcatgcaacggcggacggcccggtgctaaaagagcttcaagacaaaataatgaaacaggaagagagtagatttatctaagagccaactttattatatgaatgtgtttattgttggctttagatgatatggtaaggagttagagctaataatagataggctctattattattattattaattaaactcgctctaaggaggaaagtgggaggaagggacgaggacgaagactactggaagcatcgtgcatggatgatggatgtggtgtctcttaatgtaggtggccggaggatgtacgtgttaattgcgcgataagcactcagatccaaccgcaaactacctccacactgacacactgatagagagaaagagagacctccgacgactgccgccgcagatgagccacgtacgtatacgacgtctgccggccggctcaggctgccgccatcaccctgctcgaaagtcgcgttaggcggcgccagctacataggagtatctagtctagccagttagtatactactactgcgctgatgatgaattaactctgcatagatactgtacttgcctccctccaacacccaaccacctcctgctcggctcttaataacttggacacggatcgatgccatccaaggaagaacacgacgacgacgacggaacatccaccatgcaagcttgcatccatacgccgatacgcgtgcatccatccatccaccattatttccattttccaccgatcacacgtacacaggcctatttaaggagcgacatcccactgcaactctcctcaccactcatcaccagctagctctagcaaagcacttgccatctaccgaccgccgcattccaaacagcccgacgagctagcagagcggcaggcacctccctcctcaaggaacccatggccactgtgaacaactggctcgctttctccctctccccgcaggagctgccgccctcccagacgacggactccacactcatctcggccgccaccgccgaccatgtctccggcgatgtctgcttcaacatcccccaagattggagcatgaggggatcagagctttcggcgctcgtcgcggagccgaagctggaggacttcctcggcggcatctccttctccgagcagcatcacaaggccaactgcaacatgatacccagcactagcagcacagtttgctacgcgagctcaggtgctagcaccggctaccatcaccagctgtaccaccagcccaccagctcagcgctccacttcgcggactccgtaatggtggcttcctcggccggtgtccacgacggcggtgccatgctcagcgcggccgccgctaacggtgtcgctggcgctgccagtgccaacggcggcggcatcgggctgtccatgattaagaactggctgcggagccaaccggcgcccatgcagccgagggtggcggcggctgagggcgcgcaggggctctctttgtccatgaacatggcggggacgacccaaggcgctgctggcatgccacttctcgctggagagcgcgcacgggcgcccgagagtgtatcgacgtcagcacagggtggagccgtcgtcgtcacggcgccgaaggaggatagcggtggcagcggtgttgccggcgctctagtagccgtgagcacggacacgggtggcagcggcggcgcgtcggctgacaacacggcaaggaagacggtggacacgttcgggcagcgcacgtcgatttaccgtggcgtgacaaggcatagatggactgggagatatgaggcacatctttgggataacagttgcagaagggaagggcaaactcgtaagggtcgtcaagtctatttaggtggctatgataaagaggagaaagctgctagggcttatgatcttgctgctctgaagtactggggtgccacaacaacaacaaattttccagtgagtaactacgaaaaggagctcgaggacatgaagcacatgacaaggcaggagtttgtagcgtctctgagaaggaagagcagtggtttctccagaggtgcatccatttacaggggagtgactaggcatcaccaacatggaagatggcaagcacggattggacgagttgcagggaacaaggatctttacttgggcaccttcagcacccaggaggaggcagcggaggcgtacgacatcgcggcgatcaagttccgcggcctcaacgccgtcaccaacttcgacatgagccgctacgacgtgaagagcatcctggacagcagcgccctccccatcggcagcgccgccaagcgcctcaaggaggccgaggccgcagcgtccgcgcagcaccaccacgccggcgtggtgagctacgacgtcggccgcatcgcctcgcagctcggcgacggcggagccctggcggcggcgtacggcgcgcactaccacggcgccgcctggccgaccatcgcgttccagccgggcgccgccagcacaggcctgtaccacccgtacgcgcagcagccaatgcgcggcggcgggtggtgcaagcaggagcaggaccacgcggtgatcgcggccgcgcacagcctgcaggacctccaccacctgaacctgggcgcggccggcgcgcacgactttttctcggcagggcagcaggccgccgccgctgcgatgcacggcctgggtagcatcgacagtgcgtcgctcgagcacagcaccggctccaactccgtcgtctacaacggcggggtcggcgacagcaacggcgccagcgccgtcggcggcagtggcggtggctacatgatgccgatgagcgctgccggagcaaccactacatcggcaatggtgagccacgagcaggtgcatgcacgggcctacgacgaagccaagcaggctgctcagatggggtacgagagctacctggtgaacgcggagaacaatggtggcggaaggatgtctgcatgggggactgtcgtgtctgcagccgcggcggcagcagcaagcagcaacgacaacatggccgccgacgtcgggcatggcggcgcgcagctcttcagtgtctggaacgacacttaagcgtacctagtggtacctgacatcttatagtctgcaacctctcgtgtctgaattcctatctttatcaagtgttattgcttccacgactataggacagctttcgtcgaaagcttttgctcatgtgatctcgaaggattcatctagtctgatttttcgtgacttgtatcggttttattggattcatccaacatatatcaataaaaaatgagttgtgtttcctttcttcctagttcagttaaaattatttccctcctgcgcttgtgctgtaattgtctgtgtacctgttgtttgtgactgtgttagttcccttggatatgatttcgtatttgatatgtacatggagatagcttagcttcattattggagtatgaagttagtatgacatagtcactctcctggaaaattgacactgcaaaccatatttttattctgaaccacaaatcctagtcagtccgctggcatatgccgtccgtttgctgaatccagaacgtgggtttggagatgtacggctgagatgcctctatgcgaaggggatttcgtggtgaaacgagatgggagtagagcaacgcccgtggaagatgcttcaaacttccacacttttgagcaacgatcggcagtagtaaggtagacgatttcaagatcaaagcatatgaagataaacaacatcaacaacaaaatttgttggggttctatagagagaaacagagctacatacatacactgttttgtatctaccatctgagatgatgaaaagatgaaaaactaaagaatgccccggcgccaacgccaggacacgccgcgcgcgcgtcacccgagccatctcttgacccagccggcgctgtatatttacacacgttgcagcatcgatcaccacctgttcgatcgcgtcgccgtcaccgggatctgagtcgaaacctagacttgtccatcttctggattggccaacttaattaatgtatgaaataaaaggatgcacacatagtgacatgctaatcactataatgtgggcatcaaagttgtgtgttatgtgtaattactagttatctgaataaaagagaaagagatcatccatatttcttatcctaaatgaatgtcacgtgtctttataattctttgatgaaccagatgcatttcattaaccaaatccatatacatataaatattaatcatatataattaatatcaattgggttagcaaaacaaatctagtctaggtgtgttttgcgaatgcgaccttcttatgtgcttctagtctccaaatgtggttgatagttattttgctctaagatcaacagtaatgaagtataaatcatcgttgtggtgtgctactcggttaattgagcattaacacacacaaacatgacgaggatggtataatctccaaaaatgtgtactttgttaggtgggaccctatagccttgattaatgtgctatgttaggcatgcctggaaacgtgtgacgcatatgttttgtgaacctgttgatattatatgtgcttttatattaccatattttattaaaatactaatatttattactagtaagatataacattctatctagcttaaaaactaaccataaatattccataataactagatttaccaaactaatatactaaatatacataataaatacaaaattaacaagacaataatcaatatttatgagcttaatatatttagacattatggttggtcgacgataatcatgctaacttttcgtaattgcttgattgaaatatgcttagaataatgcctctttgttctacatggcaaatagggaccattatggtgtaacaccctgggaaccacaaacaccccgaaatgctactaaactacacaactaaccttcatatataaaatttcgacagcatctcctttgaaaatttgcatagacgtggaagcaacagagtataaacagatatcatgataagaaaacatactagacattaataatctgctagaaatgggaagaatcctaacttgacgactgcgtaactgactagagtcacacttagctgaccctagtcacttacaactgacttcgtgtcctagatcgatgggccctggccgaagcttggtcacccggtccgggcctagaaggccagcttcaagtttgtaccctggagcttgccgagtgccatccttggacactcgataaagtatattttattttttttattttgccaaccaaactttttgtggtatgttcctacactatgtagatctacatgtaccattttggcacaattacatatttacaaaaatgttttctataaatattagatttagttcgtttatttgaatttcttcggaaaattcacatttaaactgcaagtcactcgaaacatggaaaaccgtgcatgcaaaataaatgatatgcatgttatctagcacaagttacgaccgatttcagaagcagaccagaatcttcaagcaccatgctcactaaacatgaccgtgaacttgttatctagttgtttaaaaattgtataaaacacaaataaagtcagaaattaatgaaacttgtccacatgtcatgatatcatatatagaggttgtgataaaaatttgataatgtttcggtaaagttgtgacgtactatgtgtagaaacctaagtgacctacacataaaatcatagagtttcaatgtagttcactcgacaaagactttgtcaagtgtccgataaaaagtactcgacaaagaagccgttgtcgatgtactgttcgtcgagatctctttgtcgagtgtcacactaggcaaagtctttacggagtgtttttcaggctttgacactcggcaaagcgctcgattccagtagtgacagtaatttgcatcaaaaatagctgagagatttaggccccgtttcaatctcacgggataaagtttagcttcctgctaaactttagctatatgaattgaagtgctaaagtttagtttcaattaccaccattagctctcctgtttagattacaaatggctaaaagtagctaaaaaatagctgctaaagtttatctcgcgagattgaaacagggccttaaaatgagtcaactaatagaccaactaattattagctattagtcgttagcttctttaatctaagctaaaaccaactaatagcttatttgttgaattacaattagctcaacggaattctctgtttttctaaaaaaaaactgcccctctcttacagcaaattgtccgctgcccgtcgtccagatacaatgaacgtacctagtaggaactcttttacacgctcggtcgctcgccgcggatcggagtccccggaacacgacaccactgtggaacacgacaaagtctgctcagaggcggccacaccctggcgtgcaccgagccggagcccggataagcacggtaaggagagtacggcgggacgtggcgacccgtgtgtctgctgccacgcagccttcctccacgtagccgcgcggccgcgccacgtaccagggcccggcgctggtataaatgcgcgccacctccgctttagttctgcatacagccaacccaaggatgtccaacctgctcacggttcaccagaaccttccggctcttccagtggacgcgacgtccgatgaagtcaggaagaacctcatggacatgttccgcgacaggcaagcgttcagcgagcacacctggaagatgctgctctccgtctgccgctcctgggctgcatggtgcaagctgaacaacaggaagtggttccccgctgagcccgaggacgtgagggattaccttctgtacctgcaagcgcgaggtttgtttctgcttctacctttgatatatatataataattatcattaattagtagtaatataatatttcaaatatttttttcaaaataaaagaatgtagtatatagcaattgcttttctgtagtttataagtgtgtatattttaatttataacttttctaatatatgaccaaaacatggtgatgcctaggtctggcagtgaagaccatccagcaacaccttggacaactgaacatgcttcacaggcgctccggcctcccgcgccccagcgactcgaacgccgtgagcctcgtcatgcgccgcatcaggaaggaaaacgtcgatgccggcgaaagggcaaagcaggccctcgcgttcgagaggaccgatttcgaccaggtccgcagcctgatggagaacagcgacaggtgccaggacattaggaacctggcgttcctcggaattgcatacaacacgctcctcaggatcgcggaaattgcccgcattcgcgtgaaggacattagccgcaccgacggcggcaggatgcttatccacattggcaggaccaagacgctcgtttccaccgcaggcgtcgaaaaggccctcagcctcggagtgaccaagctcgtcgaacgctggatctccgtgtccggcgtcgcggacgacccaaacaactacctcttctgccgcgtccgcaagaacggggtggctgcccctagcgccaccagccaactcagcacgagggccttggaaggtattttcgaggccacccaccgcctgatctacggcgcgaaggatgacagcggtcaacgctacctcgcatggtccgggcactccgcccgcgttggagctgctagggacatggcccgcgccggtgtttccatccccgaaatcatgcaggcgggtggatggacgaacgtgaacattgtcatgaactacattcgcaaccttgacagcgagacgggcgcaatggttcgcctcctggaagatggtgactgagctagacccagctttcttgtacaaagtggccgttaacggatccagacttgtccatcttctggattggccaacttaattaatgtatgaaataaaaggatgcacacatagtgacatgctaatcactataatgtgggcatcaaagttgtgtgttatgtgtaattactagttatctgaataaaagagaaagagatcatccatatttcttatcctaaatgaatgtcacgtgtctttataattctttgatgaaccagatgcatttcattaaccaaatccatatacatataaatattaatcatatataattaatatcaattgggttagcaaaacaaatctagtctaggtgtgttttgcgaattgcggcaagctgttaccgaattcctgcccttaaggccaattgttcaagattcattcaacaattgaaacatctcccatgattaaatcagtataaggttgctatggtcttgcttgacaaagtttttttttgagggaatttcaactaaatttttgagtgaaactatcaaatactgattttaaaaaatttttataaaaggaagcgcagagataaaaggccatctatgctacaaaagtacccaaaaatgtaatcctaaagtatgaattgcattttttttttgtttggacgaaaggaaaggagtattaccacaagaatgatatcatcttcatatttagatcttttttgggtaaagcttgagattctctaaatatagagaaatcagaagaaaaaaaaaccgtgttttggtggttttgatttctagcctccacaataactttgacggcgtcgacaagtctaacggacaccaagcagcgaaccaccagcgccgagccaagcgaagcagacggccgagacgttgacaccttcggcgcggcatctctcgagagttccgctccggcgctccacctccaccgctggcggtttcttattccgttccgttccgcctcctgctctgctcctctccacaccacacggcacgaaaccgttacggcaccggcagcacccagcacgggagaggggattcctttcccaccgttccttccctttccgccccgccgctataaatagccagccccatccccagcttttttccccaatctcatctcctctctcctgttgttcggagcacacgcacaatccgatcgatccccaaatccccttcgtctctcctcgcgagcctcgtggatcccagcttcaaggtacggcgatcgatcatcccccctccttctctctaccttcttttctctagactacatcggatggcgatccatggttagggcctgctagtttcccttcctgttttgtcgatggctgcgaggcacaatagatctgatggcgttatgacggctaacttgtcatgttgttgcgatttatagtccctttaggagatcagtttaatttctcggatggttcgagatcggtggtccatggttagtaccctaagatccgcgctgttagggttcgtagatggaggcgacctgttctgattgttaacttgtcagtacctgggaaatcctgggatggttctagctcgtccgcagatgagatcgatttcatgatcctctgtatcttgtttcgttgcctaggttccgtctaatctatccgtggtatgatgtagatgttttgatcgtgctaactacgtcttgtaaagttaattgtcaggtcataatttttagcatgcctttttttttgtttggttttgtctaattgggctgtcgttctagatcagagtagaagactgttccaaactacctgctggatttattgaacttggatctgtatgtgtgtcacatatcttcataaattcatgattaagatggattgaaatatcttttatctttttggtatggatagttctatatgttggtgtggctttgttagatgtatacatgcttagatacatgaagcaacgtgctgctactgtttagtaattgctgttcatttgtctaataaacagataaggatatgtatttatgttgctgttggttttgctggtactttgttggatacaaatgcttcaatacagaaaacagcatgctgctacgatttaccatttatctaatcttatcatatgtctaatctaataaacaaacatgcttttaaattatcttcatatgcttggatgatggcatacacagcggctatgtgtggttttttaaatacccagcatcatgggcatgcatgacactgctttaatatgctttttatttgcttgagactgtttcttttgtttatactgaccctttagttcggtgactcttctgcaggtcgactttaacttagcctaggatccatggcccagtccaagcacggcctgaccaaggagatgaccatgaagtaccgcatggagggctgcgtggacggccacaagttcgtgatcaccggcgagggcatcggctaccccttcaagggcaagcaggccatcaacctgtgcgtggtggagggcggccccttgcccttcgccgaggacatcttgtccgccgccttcatgtacggcaaccgcgtgttcaccgagtacccccaggacatcgtcgactacttcaagaactcctgccccgccggctacacctgggaccgctccttcctgttcgaggacggcgccgtgtgcatctgcaacgccgacatcaccgtgagcgtggaggagaactgcatgtaccacgagtccaagttctacggcgtgaacttccccgccgacggccccgtgatgaagaagatgaccgacaactgggagccctcctgcgagaagatcatccccgtgcccaagcagggcatcttgaagggcgacgtgagcatgtacctgctgctgaaggacggtggccgcttgcgctgccagttcgacaccgtgtacaaggccaagtccgtgccccgcaagatgcccgactggcacttcatccagcacaagctgacccgcgaggaccgcagcgacgccaagaaccagaagtggcacctgaccgagcacgccatcgcctccggctccgccttgccctccggactcagatctcgatagggtaccaatggccagttaacagatccagctgctgctgttctagggttcacaagtctgcctatttgtcttccccaatggagctatggttgtctggtctggtccttggtcgtgtcccgtttcattgtgtactatttacctgtaatgtgtatccttaagtctggtttgatggtgtctgaaacgttttgctgtggtagagcagcatggaagaactataatgaataagtgatccctaatcattgtgtccaaattttgcttctgctatacccttttgtgctgtttcttatgttttgcttaaaaatttgatctgacaaacaaatttgtctaaattatgctcttgttctgactgtgtactgtacacatttgtattgctaccggtttggcacatagttttctctttgattgcagatcaaacccttctgattgcagattgcttggctatggctgatgtgctcactgttcttctttagcttgtatattgctgatggtggcttggctacggctgaaaaagttgctgctgcgccgacttggcaactgttgctccagtaatgctttgtcctctcttcctagccgccgacttggcacttggcagctgttgctcctgtaatgcgttgttatctcttatctcttgagatgtactatgattttgaggctgtttgacttgtgccagattgccagtgctgatgctatattatctcaggtttttatgctagtatatgttttactgtgtgctgcctgtgtcgagttacgtaatctattgaaccgctatgcgtgttgatgccctgttgttgcttgccagattgatgcccctgttgcttgcagcttgcaagctgtagtgaaatcctaaaattcgaaaccaaatctattctgaacttttgaagatctgtgatgtccggaagaaaagattcaaacagataaacgggactctccagaatctataaaataaatgatcgacaaacgctttgctttggtaggcttcctagttagttagcggaccgaagcttcggtccgggcctagaaggccagcttcggccgccccatttcaaatatttttttcaaaataaaagaatgtagtatatagcaattgcttttctgtagtttataacttcgtatagcatacattatacgaagttatacttttctaatatatgaccaaaatttgttgatgtgcaggtcttcgcctaccccggcggcgcgtccatggagatccaccaggcactcacccgctcccccgtcatcgccaaccacctcttccgccacgagcaaggggaggcctttgccgcctccggctacgcgcgctcctcgggccgcgtcggcgtctgcatcgccacctccggccccggcgccaccaacctagtctccgcgctcgccgacgcgctgctcgattccgtccccatggtcgccatcacgggacaggtggcgcgacgcatgattggcaccgacgccttccaggagacgcccatcgtcgaggtcacccgctccatcaccaagcacaactacctggtcctcgacgtcgacgacatcccccgcgtcgtgcaggaggctttcttcctcgcctcctctggtcgaccagggccggtgcttgtcgacatccccaaggacatccagcagcagatggcggtgcctgtctgggacaagcccatgagtctgcctgggtacattgcgcgccttcccaagccccctgcgactgagttgcttgagcaggtgctgcgtcttgttggtgaatcgcggcgccctgttctttatgtgggcggtggctgcgcagcatctggtgaggagttgcgacgctttgtggagctgactggaatcccggtcacaactactcttatgggcctcggcaacttccccagcgacgacccactgtctctgcgcatgctaggtatgcatgggacggtgtatgcaaattatgcagtggataaggccgatctgttgcttgcacttggtgtgcggtttgatgatcgcgtgacagggaagattgaggcttttgcaagcagggctaagattgtgcacgttgatattgatccggctgagattggcaagaacaagcagccacatgtgtccatctgtgcagatgttaagcttgctttgcagggcatgaatgctcttcttgaaggaagcacatcaaagaagagctttgactttggctcatggaacgatgagttggatcagcagaagagggaattcccccttgggtataaaacatctaatgaggagatccagccacaatatgctattcaggttcttgatgagctgacgaaaggcgaggccatcatcggcacaggtgttgggcagcaccagatgtgggcggcacagtactacacttacaagcggccaaggcagtggttgtcttcagctggtcttggggctatgggatttggtttgccggctgctgctggtgcttctgtggcaaacccaggtgtcactgttgttgacatcgatggagatggtagctttctcatgaacgttcaggagctagctatgatccgaattgagaacctcccagtgaaggtctttgtgctaaacaaccagcacctggggatggtggtgcagttggaggacaggttctataaggccaacagagcgcacacatacttgggaaacccagagaatgaaagtgagatatatccagatttcgtgacgatcgccaaagggttcaacattccagcggtccgtgtgacaaagaagaacgaagtccgcgcagcgataaagaagatgctcgagactccagggccgtacctcttggatataatcgtcccacaccaggagcatgtgttgcctatgatccctagtggtggggctttcaaggatatgatcctggatggtgatggcaggactgtgtactgatgactagctagtcagttaacagatctgccagatcctcggtgtacaaataacccgtcttatcctatgagacgggccggcgtcagtgtgttctggaggaatttttatgtcagagcctttttctttgtgtgcttgatgtagatgccaagggaagcttattggctgttgaagcttgatgcaaaataaattatggaactctgttttttgtttatctaataataactagcaaatatgcttccattgcattgaaactaacagccttttgtgtttccaagttttattttgtgacaatgtcatctatttcaattagttgtggaatcggaaacttgcaggactaacttggaaactccaatccctcagcatcctggactttttcctggtgtaatccatgtagatattattttaatcatcattttagttctggaggtttttccatctccggttttgctcccctttcttcaaaaaaaaaaaaaaaatgccgtaggcgccgcaacgcccacctgttgttcaaactcatgggcacgagtggctcgaagattttatacaacaattgctgtagtttcaccgttgctggtgaagaagcatttttttaaaaaaatatagtggtattcattttaattagtttagttgtgcagcgagcaaaatttggacatgctctgctcggaatctgatcgacctagacacagattagcagcagtagctttgtcatctgttccaagagttgcgatctgatagaagaaaaaaaaaccttcccttcaatgtaaaaccgaaactaacaagaaagaagcacagtgccgtttaggcaagtatggagtacgtattaagcatgtagaaggccatgcatgaaccactaacaagaaagaagcgcagtgccattcaggcaagcataagcatgtagattggcatgcatgaacaactaacagtagatcgtctctggtctgattagaagttttttgggaagccaagaaatcatgtacaactggttccatctcaaattccgtggcaaaaagaggcctaagcaacataaagctttccactggttgccatatatgatttgggcatttcactttgatcttaatgggccttgtaaagcccaagactcatgattatctttagttgatgctcttaattaggtgtgggcaaataattcaaactgtatgtacccgaccaaaaccaaagcaaaaataatcgaaccaaaccgaaaatttaaaaataaccgaatgaaaactaaatcctataactgaaagaactgaaaccgaatcaaaatatttaatgtaaccaaaaatatccgaaatataattatattgtcaaaaatattaataatttctagattaaataattaaaaatacttaaaaatttatataaaatagtaaaaatactcgaaaataaccacaaatattcaaaaacaaccgaaatatcccaaaatattcaaagcaaaataaccgaatggataccaaattttaaaaccgaaaaaactggaacaaaaccaaaatcgaaccaaaatttcaaaaatcgaataaatactaaactttagaacaaaaaaaaacgataaccgaatgtatacgaaccaaagccgaattagataaccgaacgtccaggactactcttaatctttccgccacttatgatttgggctattactttgtttataatgagccttttcaagctcaagttcatgattgtccgtgagatgagaaactgacttgttggattcgaaaccctagctagtattggttaatacttaatacataaatgacctgcattgacatcatcatccaagaaaataaaaattgtatgcttgagatatttagttttcctagctaggttttctttattttagtaccgaatctttaggtgtgccacgttaatttagacccattttttcatacttaccaactgagtctagtttaatcatgactataatcgtataaaatgattcagtcgacgtcattgcgaacgtatataaaatcatccaaattgacgtcattccaaagaggtaagcatgcttatctaagagtccgagcatactaaacaagacgacattttatttgcactccaaatcaaattttgtattgcctaaagaaaaacaatcaaactcaagtttcttaaaattaatttcattcaaactaatcactttcaatatctcacatattattcatgccatttctatttgtctaaacatgatttaaaaaaaaaagtaaaatacaaagattactatgcaaaaactctataaaaaaaaattcaaatttcttatttatttgtgacatcaaattttcaaaataatttttttaattatcggttgatccggtcagtcgataaaaacataaactttcagcgaccgttaaaactttcctactaccgatttagagaaaatcttagcttgaaacgtaattgtaacctgccttcatgcaagtcgcaagatatgtcatcctaagttgtatatgttttctcaaaagatgtatttacttgagaaaatacgtttcaacgttgatggacaaccaattaagaatcaagcacctttcgtaatcaatttaggcttatcgtctaaggtatactgatttacgacagttgactagacttataaggaacaaaataatagaatagtttctaaacacttcacctaatcatagagactaagatggtaattcgtaaacgacaaagcctagtgacactgtccattgtaaaattccacatcatattagtattaaacatatacatgtagtttcctgaacacatgtagtatcaaacacacttcgtggcttcttcctcgaaacctgcggccgctcattaattaagtcatctagttgaaggatcgctatcaactttgtatagaaaagttgggccgaattcgagctcggtacggccagaatggcccggaccgaagcttaccggtcgttgagaacaaatctggaaggccatccttgccttctgtcgtcgggcgcaccggacagtccggtgcacaccggacactgtccggtgcccgatttccttccttaaacatcgcagccgaccgttgccaaccgttgcagatctggcgcaccggacagtccggtgcacaccggacagtccggtgccactttccgaccgttggccagaccacgtgtcgcgcgcagatttcgcggccgaccgttggctcgggccgaccgttggctcaccggaaagtccggtgcacaccggacagtccggtgaattttagccgtacgccgtcggcaaattcccgagagcagcgtcttcaggtcgaggcagcctggcgcaccggacactgtccggtgcaccaccggagagtccggtgccccagaccgaagcagtcttttggctgtacacagccaactcttcttctttcttcttctctctgtttctattacttagacaagtatattagtacacaaaaccaatgtactaaggcttagaaacatacctttacttgtgatttgcactttgttcatccatgggcatagatttacatttaagcacttgtgttgacactcaatcaccaaaatacttagaaatggcccaaaggcacatttccctttcagtctttcatcgaacatcatggtcacgttcttcataccataaaaactagcattcccataaacatttgtctccacgcttcctccatggtatagtgtcactagggtgtccatctattgcaaacatggattactaactcaataatggctaaatactagtgcctcaatacttactaagtagtaaataaataataactgcttactatatagtaaatattaaatgaccacattaaccgaaattacataatctatgaataatgtacgaaaacaatgtatacatgagatcgcgtacgagtccagctaacggtggagaaggtcaagtcggaaggacacctatatacaaaaaatactattgtcaataaaaaatcggcagcacctcccctataaagtgatgtttctaaaacctacaaagaaataacaacacgatggttgccaacacagaaaactgctaccaacaagtatatgttaaaccctatataatcactcactttcctccatccattacactaacaatatgctaccgacttactaactatataatcactaactatatacacgaacaaataaatacctagctaactatttataataacaaatgaatagctaacagactatacattaaaccaagtaatcttgtgctacaaatttatttttcagacagaaaaatctatttagctaactaattaatacaaattaataccaagcaacgatagatgaacatctagttgtctaattagctaactaattaatacaaattaagtagaatccttaccgtggggagatggggcgcgacgaagtgctcgagcttggggcgcggcgaccggcgacgtgaagcttgggggcgcgggggccggacggcgctgcgggcggcatggcgggcggctgcgggcggcggcgcgggcgcaggaaacaaacgacgggagtgggaggaaggagaaagcggcgcgccggtttagtcctagctcggcgccaagatctgtggcgccgagctaggtgccacgatggccgccgcgtcagcaaagctcggcgccaaggcatgttgcgccgagccgtgttagctcggcgtcatagctcatggtgccgagttttgggtctaaaattgcgtttaagtattctagggatctaaacgcaaatatttttcgaaaatagggccgaaaaacaaaaaaaaatcggtcgtttcgtcgagcacatcgtccagcctatcttgcatgtccatcctctctatggttcgcgagccgcgcgcatggcgctccaaaggaggggcgaggttgaatatagacagatggaatgggtggttctctatttatagcgcatgcagtcgtcccctggcacacctatttatatgtgagcgttcctggcactagagagatcgatcgatcgagcttaattgcgccactgctcgttatcctcctcttgcattgcattgcaggtcgtagttgagcagcagcaaccactgcacaggcctaggcgcgccatttaaatatggcgcccagcagctacgaggtggcggcttccatcctcctctgcgccgaggacagcagcagcatcctggacctcgaagcggaggccgaggaggaagcgctactggcgcggagcggggagcccggcggcggcgcggagttccccgtgccgtccgaggaatgcgtcgccggtttcctggagtctgaggcagcgcacatgccgcgggaggactacgccgagaggctgcgcagcggggggatggatctccgcgtccggacggacgccatcgactggatttggaaggttcacacgtgctacggtttcggccctctcactgcctgcttggccgtcaactacctggaccgcttcctctcgctctaccagcttccggaaggcaaggcttggatgacacagctgctgtccgtggcgtgcttgtccctggccgccaagatggaggagacctacgtcccttcgtccctggacctgcaggccggggacgcgcggtacgtgttcgaggcgaagacgatccagaggatggagctcctggtcctcagcacgctcaagtggaggatgcaagcggtcacccccttgtcgtacgtcgactacttcctccaccggctccgaggcggcgccgcgccgagcagacgcgccgtcctccgatccgcggagctcatcctgtgcatcgccagagggacgcactgcttggatttcaggccctcggagatcgccttggccgtcgccgccaccgtggccggcgaagagcgcgccgtggacatcgacagggccttcacccaccgtgtacataaggagagggtgtcgcgatgcctcgaagcgatccagcaggccaccgccaccatggccctgccgcagccgctgaaaagtgaaggcccgagcagcagcggccgcagggcctcgtcttcctcggccaccgtgccgcggagccccaccggggtgctggacgctggctgcctgagctacaggagagccgccgccgccgccgcctcgcacgcgagctccagctggcgcgacgaggacgacgacgactgccccccggctgtctgcagcaagaggaggaagattagcagatgaatttaaatgcccgggcgatcgctcgaggcgtacctagtggtaccacatggttaacctagacttgtccatcttctggattggccaacttaattaatgtatgaaataaaaggatgcacacatagtgacatgctaatcactataatgtgggcatcaaagttgtgtgttatgtgtaattactagttatctgaataaaagagaaagagatcatccatatttcttatcctaaatgaatgtcacgtgtctttataattctttgatgaaccagatgcatttcattaaccaaatccatatacatataaatattaatcatatataattaatatcaattgggttagcaaaacaaatctagtctaggtgtgttttgcgaatgcggccgccaccgcggtggagctcgaattccggtccgggcctagaaggccagcttcaagtttgtacaaaaaagcaggctccggccagaatggcccggaccgggttaccgaattcgagctcggtaccctgggatccgatatcgatgggccctggccgaagcttggtcacccggtccgggcctagaaggccgatctcccgggcacccagctttcttgtacaaagtggccgttaacggatcggccagaatggcccggaccgaagcttgcatgcctgcagtgcagcgtgacccggtcgtgcccctctctagagataatgagcattgcatgtctaagttataaaaaattaccacatattttttttgtcacacttgtttgaagtgcagtttatctatctttatacatatatttaaactttactctacgaataatataatctatagtactacaataatatcagtgttttagagaatcatataaatgaacagttagacatggtctaaaggacaattgagtattttgacaacaggactctacagttttatctttttagtgtgcatgtgttctcctttttttttgcaaatagcttcacctatataatacttcatccattttattagtacatccatttagggtttagggttaatggtttttatagactaatttttttagtacatctattttattctattttagcctctaaattaagaaaactaaaactctattttagtttttttatttaataatttagatataaaatagaataaaataaagtgactaaaaattaaacaaataccctttaagaaattaaaaaaactaaggaaacatttttcttgtttcgagtagataatgccagcctgttaaacgccgtcgacgagtctaacggacaccaaccagcgaaccagcagcgtcgcgtcgggccaagcgaagcagacggcacggcatctctgtcgctgcctctggacccctctcgagagttccgctccaccgttggacttgctccgctgtcggcatccagaaattgcgtggcggagcggcagacgtgagccggcacggcaggcggcctcctcctcctctcacggcaccggcagctacgggggattcctttcccaccgctccttcgctttcccttcctcgcccgccgtaataaatagacaccccctccacaccctctttccccaacctcgtgttgttcggagcgcacacacacacaaccagatctcccccaaatccacccgtcggcacctccgcttcaaggtacgccgctcgtcctcccccccccccctctctaccttctctagatcggcgttccggtccatgcatggttagggcccggtagttctacttctgttcatgtttgtgttagatccgtgtttgtgttagatccgtgctgctagcgttcgtacacggatgcgacctgtacgtcagacacgttctgattgctaacttgccagtgtttctctttggggaatcctgggatggctctagccgttccgcagacgggatcgatttcatgattttttttgtttcgttgcatagggtttggtttgcccttttcctttatttcaatatatgccgtgcacttgtttgtcgggtcatcttttcatgcttttttttgtcttggttgtgatgatgtggtctggttgggcggtcgttctagatcggagtagaattctgtttcaaactacctggtggatttattaattttggatctgtatgtgtgtgccatacatattcatagttacgaattgaagatgatggatggaaatatcgatctaggataggtatacatgttgatgcgggttttactgatgcatatacagagatgctttttgttcgcttggttgtgatgatgtggtgtggttgggcggtcgttcattcgttctagatcggagtagaatactgtttcaaactacctggtgtatttattaattttggaactgtatgtgtgtgtcatacatcttcatagttacgagtttaagatggatggaaatatcgatctaggataggtatacatgttgatgtgggttttactgatgcatatacatgatggcatatgcagcatctattcatatgctctaaccttgagtacctatctattataataaacaagtatgttttataattattttgatcttgatatacttggatgatggcatatgcagcagctatatgtggatttttttagccctgccttcatacgctatttatttgcttggtactgtttcttttgtcgatgctcaccctgttgtttggtgttacttctgcaggtcgactttaacttagcctaggatccatggcctcctccgagaacgtcatcaccgagttcatgcgcttcaaggtgcgcatggagggcaccgtgaacggccacgagttcgagatcgagggcgagggcgagggccgcccctacgagggccacaacaccgtgaagctgaaggtgaccaagggcggccccctgcccttcgcctgggacatcctgtccccccagttccagtacggctccaaggtgtacgtgaagcaccccgccgacatccccgactacaagaagctgtccttccccgagggcttcaagtgggagcgcgtgatgaacttcgaggacggcggcgtggcgaccgtgacccaggactcctccctgcaggacggctgcttcatctacaaggtgaagttcatcggcgtgaacttcccctccgacggccccgtgatgcagaagaagaccatgggctgggaggcctccaccgagcgcctgtacccccgcgacggcgtgctgaagggcgagacccacaaggccctgaagctgaaggacggcggccactacctggtggagttcaagtccatctacatggccaagaagcccgtgcagctgcccggctactactacgtggacgccaagctggacatcacctcccacaacgaggactacaccatcgtggagcagtacgagcgcaccgagggccgccaccacctgttcctgtagggtaccacatggttaacctagacttgtccatcttctggattggccaacttaattaatgtatgaaataaaaggatgcacacatagtgacatgctaatcactataatgtgggcatcaaagttgtgtgttatgtgtaattactagttatctgaataaaagagaaagagatcatccatatttcttatcctaaatgaatgtcacgtgtctttataattctttgatgaaccagatgcatttcattaaccaaatccatatacatataaatattaatcatatataattaatatcaattgggttagcaaaacaaatctagtctaggtgtgttttgcgaatgcggccgccaccgcggtggagctcgaattccggtccgggcctagaaggccagcttcggccgccccgggcaactttattatacaaagttgatagatcctcatgtcttcatcgtaagcttaaacaggccagaatggcctctggattcagcggcctagaaggccgaagtacttggtcttcctagtcgagtagatcacattcaagcttggtcacccggtccgtcaatattctgattccgatgacttcgtaggttcctagctcaagccgctcgtgtccaagcgtcacttacgattagctaatgattacggcatctaggaccgactagtggcgcgccgactagctagctaaggtaccgagctcgaattcattccgattaatcgtggcctcttgctcttcaggatgaagagctatgtttaaacgtgcaagcgctactagacaattcagtacattaaaaacgtccgcaatgtgttattaagttgtctaagcgtcaatttgtttacaccacaatatatcctgcca

SEQ ID NO: 36 - DNA, 29276 bp, Artificial Sequence
  RX000007
gtttacccgccaatatatcctgtcaaacactgatagtttaaactgaaggcgggaaacgacaatctgatcatgagcggagaattaagggagtcacgttatgacccccgccgatgacgcgggacaagccgttttacgtttggaactgacagaaccgcaacgttgaaggagccactcagcaagctggtacgattgtaatacgactcactatagggcgaattgagcgctgtttaaacgctcttcaactggaagagcggttacgctgtttaaacgctcttcaactggaagagcggttactaccggttcactagctagctgctaatcgagctagttaccctatgaggtgacatgaagcgctcacggttactatgacggttagcttcacgactgttggtggcagtagcgtacgacttagctatagttccggacttacccttaagcgatttaaatctgcggttaccgaattcgagctcggtaccctgggatctgcccttactttaacgcctctaaccaacacccctttatctttataaggaacaataaacagaatttgccccactgttctaaatcacctaataatatccccagctaaaaacaataaaggtttcctagaattaagacaagcatgactgttcctccaggagggtttggaacattgttgcagtcttgcagatacgggcgaagggtgagaaacagagcggagggctggaggtgacctcggtagtcgacgccggagttgagcttgacaacgacggggcggcccctgatggacttgaggaagtccgatggcgtcttcaccgtcccgccggcgcccgaggcgggcctgtcgctgccgccgccgccgctgctcatcttgcgcgctgtgcccccggcggtgtccctgtgttgcggatcgcgggtgggccaggtggatgcgagggcgacccgtttggactccggccggagccgccggatccctggtcggtgtcagtgccgtttactctgggccccacgtgtcagtaccgtctgtagatgacaacaacccgtcgtccacagtcatgtccaaaatatcctttcttcttttttttcgattcggatatctatcttccttttttttttccaaaaatcttcttgacgcaccagcgcgcacgtttgtggtaaacgccgacacgtcggtcccacgtcgatagaccccacccaccagtgagtagcgtgtacgtattcgggggtgacggacgtgtcgccgtcgtcttgctagtcccattcccatctgagccacacatctctgaacaaaaaaaaggagggaggcctccacgcacatccccctccgtgccacccgccccaaaccctcgcgccgcctccgagacagccgccgcaaccatggccaccgccgccgccgcgtctaccgcgctcactggcgccactaccgctgcgcccaaggcgaggcgccgggcgcacctcctggccacccgccgcgccctcgccgcgcccatcaggtgctcagcggcgtcacccgccatgccgatggctcccccggccaccccgctccggccgtggggccccaccgagccccgcaagggtgctgacatcctcgtcgagtccctcgagcgctgcggcgtccgcgacgtaagtttctgcttctacctttgatatatatataataattatcattaattagtagtaatataatatttcaaatatttttttcaaaataaaagaatgtagtatatagcaattgcttttctgtagtttataacttcgtatagcatacattatacgaagttatacttttctaatatatgaccaaaatttgttaccgaattcaggcgacccatcgctgctttgtctacatcatgttcttcatcatcctccccaggcgacgcgtgctgctgttcttattcagactaccgttcgagtgactgcatggcgtacatctttctgcatcgactttgtacggctacatcgaacatatacacgagatgtctcgtgtgaatagagtcactaatgccttaagcatcggttactccgtagggtacattctgttcttcttatttgtgcatatttttattgttgtttactgattatacgagtagttatacatacatgcacatacatatcatcacatatatcacaatatttttctaaattaaattaaaactaaaaatgactaaatttctaacaccaacgacattgtaatgttttctccaacaactttacctattctacattgttctatttcgaatttcactctataaacaacatagtctacaatggaaaacagtgctttgtacgactatatacgcgatgtgtggctacaacataagacaatatagtcgtttgaagattgaacctatatatcggtacggttaatccgtctatgtacgtgggcatgacgaacacccgtgataacgaaggattaacgtgcacaatcataaatccaaagtaggagcggtgcatgatgagaatcgctctcagtactcgacataatgaaccttacgaggtacaacaggcaggcaggcagggaccaggggccgcctttatttcaggctcgctggccccacgggcgtgctgcgtgcacgaagggcactaccccaacctctcaccgaaaaccgcgctggatcggcaaatcaaacgaggtggtgccccgtgcccactctccacgtccacggcaccatccctctgcagccgctcaccagccatgccgtgtcgcggaacggcacaaccacccccaacccactcacgaaaccccgtcccggccgtgcccgtgtcggtccgcgctcggcaacgaggcggcccgcgctgctgagtcccctggacacccgacaccctgtcggccctttgtttattcatcccgaaatctcatctgcccccacggccgactgcgctgcgccgcccggatatatatacccatcgttatcgatcgactggggactctatcagtgatagagtctagaggatcgctcaggaaggccgctgagatagaggcatggcggccaatgcgggcggcggtggagcgggaggaggcagcggcagcggcagcgtggctgcgccggcggtgtgccgccccagcggctcgcggtggacgccgacgccggagcagatcaggatgctgaaggagctctactacggctgcggcatccggtcgcccagctcggagcagatccagcgcatcaccgccatgctgcggcagcacggcaagatcgagggcaagaacgtcttctactggttccagaaccacaaggcccgcgagcgccagaagcgccgcctcaccagcctcgacgtcaacgtgcccgccgccggcgcggccgacgccaccaccagccaactcggcgtcctctcgctgtcgtcgccgccgccttcaggcgcggcgcctccctcgcccaccctcggcttctacgccgccggcaatggcggcggatcggctgtgctgctggacacgagttccgactggggcagcagcggcgctgccatggccaccgagacatgcttcctgcaggactacatgggcgtgacggacacgggcagctcgtcgcagtggccacgcttctcgtcgtcggacacgataatggcggcggccgcggcgcgggcggcgacgacgcgggcgcccgagacgctccctctcttcccgacctgcggcgacgacggcggcagcggtagcagcagctacttgccgttctggggtgccgcgtccacaactgccggcgccacttcttccgttgcgatccagcagcaacaccagctgcaggagcagtacagcttttacagcaacagcaacagcacccagctggccggcaccggcaaccaagacgtatcggcaacagcagcagcagccgccgccctggagctgagcctcagctcatggtgctccccttaccctgctgcagggagtatgtgagagcaacgcgagctgccactgctcttcactggtaccgttaacagatcattcgacaaagcagcattagtccgttgatcggtggaagaccactcgtcagtgttgagttgaatgtttgatcaataaaatacggcaatgctgtaagggttgttttttatgccattgataatacactgtactgttcagttgttgaactctatttcttagccatgccaagtgcttttcttattttgaataacattacagcaaaaagttgaaagacaaaaaaaaaaacccccgaacagagtgctttgggtcccaagcttctttagactgtgttcggcgttccccctaaatttctccccctatatctcactcacttgtcacatcagcgttctctttccccctatatctccacgctctacagcagttccacctatatcaaacctctataccccaccacaacaatattatatactttcatcttcaactaactcatgtaccttccaatttttttctactaataattatttacgtgcacagaaacttagcaaggagagagagagcggggtgacccaccttgctagttggatattacctcttctcttcaaagtatccttgaacgctcaccggttatcaaatctctacactatagctctgtagtcttgctagatagttagttctttagctctcggtgaccaagcttggcgcgatcaagcttatcgataccgtcgacctcgaagcttggtcacccggtccgggcctagaaggccagcttcaagtttgtacaaaaaagcaggctccggccagaatggcccggaccgggttaccgaattcttaccctagctccctgcggctgttacgcggtcccccatcaatcttctgttcttgcggttgtagcctgtgtaacagtgctagagtatgtatgataaataggttttaagtctgcttacatgacattttttattgtggaagagacatataaaaattagagagagtggttctcatgcaacggcggacggcccggtgctaaaagagcttcaagacaaaataatgaaacaggaagagagtagatttatctaagagccaactttattatatgaatgtgtttattgttggctttagatgatatggtaaggagttagagctaataatagataggctctattattattattattaattaaactcgctctaaggaggaaagtgggaggaagggacgaggacgaagactactggaagcatcgtgcatggatgatggatgtggtgtctcttaatgtaggtggccggaggatgtacgtgttaattgcgcgataagcactcagatccaaccgcaaactacctccacactgacacactgatagagagaaagagagacctccgacgactgccgccgcagatgagccacgtacgtatacgacgtctgccggccggctcaggctgccgccatcaccctgctcgaaagtcgcgttaggcggcgccagctacataggagtatctagtctagccagttagtatactactactgcgctgatgatgaattaactctgcatagatactgtacttgcctccctccaacacccaaccacctcctgctcggctcttaataacttggacacggatcgatgccatccaaggaagaacacgacgacgacgacggaacatccaccatgcaagcttgcatccatacgccgatacgcgtgcatccatccatccaccattatttccattttccaccgatcacacgtacacaggcctatttaaggagcgacatcccactgcaactctcctcaccactcatcaccagctagctctagcaaagcacttgccatctaccgaccgccgcattccaaacagcccgacgagctagcagagcggcaggcacctccctcctcaaggaacccatggccactgtgaacaactggctcgctttctccctctccccgcaggagctgccgccctcccagacgacggactccacactcatctcggccgccaccgccgaccatgtctccggcgatgtctgcttcaacatcccccaagattggagcatgaggggatcagagctttcggcgctcgtcgcggagccgaagctggaggacttcctcggcggcatctccttctccgagcagcatcacaaggccaactgcaacatgatacccagcactagcagcacagtttgctacgcgagctcaggtgctagcaccggctaccatcaccagctgtaccaccagcccaccagctcagcgctccacttcgcggactccgtaatggtggcttcctcggccggtgtccacgacggcggtgccatgctcagcgcggccgccgctaacggtgtcgctggcgctgccagtgccaacggcggcggcatcgggctgtccatgattaagaactggctgcggagccaaccggcgcccatgcagccgagggtggcggcggctgagggcgcgcaggggctctctttgtccatgaacatggcggggacgacccaaggcgctgctggcatgccacttctcgctggagagcgcgcacgggcgcccgagagtgtatcgacgtcagcacagggtggagccgtcgtcgtcacggcgccgaaggaggatagcggtggcagcggtgttgccggcgctctagtagccgtgagcacggacacgggtggcagcggcggcgcgtcggctgacaacacggcaaggaagacggtggacacgttcgggcagcgcacgtcgatttaccgtggcgtgacaaggcatagatggactgggagatatgaggcacatctttgggataacagttgcagaagggaagggcaaactcgtaagggtcgtcaagtctatttaggtggctatgataaagaggagaaagctgctagggcttatgatcttgctgctctgaagtactggggtgccacaacaacaacaaattttccagtgagtaactacgaaaaggagctcgaggacatgaagcacatgacaaggcaggagtttgtagcgtctctgagaaggaagagcagtggtttctccagaggtgcatccatttacaggggagtgactaggcatcaccaacatggaagatggcaagcacggattggacgagttgcagggaacaaggatctttacttgggcaccttcagcacccaggaggaggcagcggaggcgtacgacatcgcggcgatcaagttccgcggcctcaacgccgtcaccaacttcgacatgagccgctacgacgtgaagagcatcctggacagcagcgccctccccatcggcagcgccgccaagcgcctcaaggaggccgaggccgcagcgtccgcgcagcaccaccacgccggcgtggtgagctacgacgtcggccgcatcgcctcgcagctcggcgacggcggagccctggcggcggcgtacggcgcgcactaccacggcgccgcctggccgaccatcgcgttccagccgggcgccgccagcacaggcctgtaccacccgtacgcgcagcagccaatgcgcggcggcgggtggtgcaagcaggagcaggaccacgcggtgatcgcggccgcgcacagcctgcaggacctccaccacctgaacctgggcgcggccggcgcgcacgactttttctcggcagggcagcaggccgccgccgctgcgatgcacggcctgggtagcatcgacagtgcgtcgctcgagcacagcaccggctccaactccgtcgtctacaacggcggggtcggcgacagcaacggcgccagcgccgtcggcggcagtggcggtggctacatgatgccgatgagcgctgccggagcaaccactacatcggcaatggtgagccacgagcaggtgcatgcacgggcctacgacgaagccaagcaggctgctcagatggggtacgagagctacctggtgaacgcggagaacaatggtggcggaaggatgtctgcatgggggactgtcgtgtctgcagccgcggcggcagcagcaagcagcaacgacaacatggccgccgacgtcgggcatggcggcgcgcagctcttcagtgtctggaacgacacttaagcgtacctagtggtacctgacatcttatagtctgcaacctctcgtgtctgaattcctatctttatcaagtgttattgcttccacgactataggacagctttcgtcgaaagcttttgctcatgtgatctcgaaggattcatctagtctgatttttcgtgacttgtatcggttttattggattcatccaacatatatcaataaaaaatgagttgtgtttcctttcttcctagttcagttaaaattatttccctcctgcgcttgtgctgtaattgtctgtgtacctgttgtttgtgactgtgttagttcccttggatatgatttcgtatttgatatgtacatggagatagcttagcttcattattggagtatgaagttagtatgacatagtcactctcctggaaaattgacactgcaaaccatatttttattctgaaccacaaatcctagtcagtccgctggcatatgccgtccgtttgctgaatccagaacgtgggtttggagatgtacggctgagatgcctctatgcgaaggggatttcgtggtgaaacgagatgggagtagagcaacgcccgtggaagatgcttcaaacttccacacttttgagcaacgatcggcagtagtaaggtagacgatttcaagatcaaagcatatgaagataaacaacatcaacaacaaaatttgttggggttctatagagagaaacagagctacatacatacactgttttgtatctaccatctgagatgatgaaaagatgaaaaactaaagaatgccccggcgccaacgccaggacacgccgcgcgcgcgtcacccgagccatctcttgacccagccggcgctgtatatttacacacgttgcagcatcgatcaccacctgttcgatcgcgtcgccgtcaccgggatctgagtcgaaacctagacttgtccatcttctggattggccaacttaattaatgtatgaaataaaaggatgcacacatagtgacatgctaatcactataatgtgggcatcaaagttgtgtgttatgtgtaattactagttatctgaataaaagagaaagagatcatccatatttcttatcctaaatgaatgtcacgtgtctttataattctttgatgaaccagatgcatttcattaaccaaatccatatacatataaatattaatcatatataattaatatcaattgggttagcaaaacaaatctagtctaggtgtgttttgcgaatgcgaccttcttatgtgcttctagtctccaaatgtggttgatagttattttgctctaagatcaacagtaatgaagtataaatcatcgttgtggtgtgctactcggttaattgagcattaacacacacaaacatgacgaggatggtataatctccaaaaatgtgtactttgttaggtgggaccctatagccttgattaatgtgctatgttaggcatgcctggaaacgtgtgacgcatatgttttgtgaacctgttgatattatatgtgcttttatattaccatattttattaaaatactaatatttattactagtaagatataacattctatctagcttaaaaactaaccataaatattccataataactagatttaccaaactaatatactaaatatacataataaatacaaaattaacaagacaataatcaatatttatgagcttaatatatttagacattatggttggtcgacgataatcatgctaacttttcgtaattgcttgattgaaatatgcttagaataatgcctctttgttctacatggcaaatagggaccattatggtgtaacaccctgggaaccacaaacaccccgaaatgctactaaactacacaactaaccttcatatataaaatttcgacagcatctcctttgaaaatttgcatagacgtggaagcaacagagtataaacagatatcatgataagaaaacatactagacattaataatctgctagaaatgggaagaatcctaacttgacgactgcgtaactgactagagtcacacttagctgaccctagtcacttacaactgacttcgtgtcctagatcgatgggccctggccgaagcttggtcacccggtccgggcctagaaggccagcttcaagtttgtaccctggagcttgccgagtgccatccttggacactcgataaagtatattttattttttttattttgccaaccaaactttttgtggtatgttcctacactatgtagatctacatgtaccattttggcacaattacatatttacaaaaatgttttctataaatattagatttagttcgtttatttgaatttcttcggaaaattcacatttaaactgcaagtcactcgaaacatggaaaaccgtgcatgcaaaataaatgatatgcatgttatctagcacaagttacgaccgatttcagaagcagaccagaatcttcaagcaccatgctcactaaacatgaccgtgaacttgttatctagttgtttaaaaattgtataaaacacaaataaagtcagaaattaatgaaacttgtccacatgtcatgatatcatatatagaggttgtgataaaaatttgataatgtttcggtaaagttgtgacgtactatgtgtagaaacctaagtgacctacacataaaatcatagagtttcaatgtagttcactcgacaaagactttgtcaagtgtccgataaaaagtactcgacaaagaagccgttgtcgatgtactgttcgtcgagatctctttgtcgagtgtcacactaggcaaagtctttacggagtgtttttcaggctttgacactcggcaaagcgctcgattccagtagtgacagtaatttgcatcaaaaatagctgagagatttaggccccgtttcaatctcacgggataaagtttagcttcctgctaaactttagctatatgaattgaagtgctaaagtttagtttcaattaccaccattagctctcctgtttagattacaaatggctaaaagtagctaaaaaatagctgctaaagtttatctcgcgagattgaaacagggccttaaaatgagtcaactaatagaccaactaattattagctattagtcgttagcttctttaatctaagctaaaaccaactaatagcttatttgttgaattacaattagctcaacggaattctctgtttttctaaaaaaaaactgcccctctcttacagcaaattgtccgctgcccgtcgtccagatacaatgaacgtacctagtaggaactcttttacacgctcggtcgctcgccgcggatcggagtccccggaacacgacaccactgtggaacacgacaaagtctgctcagaggcggccacaccctggcgtgcaccgagccggagcccggataagcacggtaaggagagtacggcgggacgtggcgacccgtgtgtctgctgccacgcagccttcctccacgtagccgcgcggccgcgccacgtaccagggcccggcgctggtataaatgcgcgccacctccgctttagttctgcatacagccaacccaaggatgtccaacctgctcacggttcaccagaaccttccggctcttccagtggacgcgacgtccgatgaagtcaggaagaacctcatggacatgttccgcgacaggcaagcgttcagcgagcacacctggaagatgctgctctccgtctgccgctcctgggctgcatggtgcaagctgaacaacaggaagtggttccccgctgagcccgaggacgtgagggattaccttctgtacctgcaagcgcgaggtttgtttctgcttctacctttgatatatatataataattatcattaattagtagtaatataatatttcaaatatttttttcaaaataaaagaatgtagtatatagcaattgcttttctgtagtttataagtgtgtatattttaatttataacttttctaatatatgaccaaaacatggtgatgcctaggtctggcagtgaagaccatccagcaacaccttggacaactgaacatgcttcacaggcgctccggcctcccgcgccccagcgactcgaacgccgtgagcctcgtcatgcgccgcatcaggaaggaaaacgtcgatgccggcgaaagggcaaagcaggccctcgcgttcgagaggaccgatttcgaccaggtccgcagcctgatggagaacagcgacaggtgccaggacattaggaacctggcgttcctcggaattgcatacaacacgctcctcaggatcgcggaaattgcccgcattcgcgtgaaggacattagccgcaccgacggcggcaggatgcttatccacattggcaggaccaagacgctcgtttccaccgcaggcgtcgaaaaggccctcagcctcggagtgaccaagctcgtcgaacgctggatctccgtgtccggcgtcgcggacgacccaaacaactacctcttctgccgcgtccgcaagaacggggtggctgcccctagcgccaccagccaactcagcacgagggccttggaaggtattttcgaggccacccaccgcctgatctacggcgcgaaggatgacagcggtcaacgctacctcgcatggtccgggcactccgcccgcgttggagctgctagggacatggcccgcgccggtgtttccatccccgaaatcatgcaggcgggtggatggacgaacgtgaacattgtcatgaactacattcgcaaccttgacagcgagacgggcgcaatggttcgcctcctggaagatggtgactgagctagacccagctttcttgtacaaagtggccgttaacggatccagacttgtccatcttctggattggccaacttaattaatgtatgaaataaaaggatgcacacatagtgacatgctaatcactataatgtgggcatcaaagttgtgtgttatgtgtaattactagttatctgaataaaagagaaagagatcatccatatttcttatcctaaatgaatgtcacgtgtctttataattctttgatgaaccagatgcatttcattaaccaaatccatatacatataaatattaatcatatataattaatatcaattgggttagcaaaacaaatctagtctaggtgtgttttgcgaattgcggcaagctgttaccgaattcctgcccttaaggccaattgttcaagattcattcaacaattgaaacatctcccatgattaaatcagtataaggttgctatggtcttgcttgacaaagtttttttttgagggaatttcaactaaatttttgagtgaaactatcaaatactgattttaaaaaatttttataaaaggaagcgcagagataaaaggccatctatgctacaaaagtacccaaaaatgtaatcctaaagtatgaattgcattttttttttgtttggacgaaaggaaaggagtattaccacaagaatgatatcatcttcatatttagatcttttttgggtaaagcttgagattctctaaatatagagaaatcagaagaaaaaaaaaccgtgttttggtggttttgatttctagcctccacaataactttgacggcgtcgacaagtctaacggacaccaagcagcgaaccaccagcgccgagccaagcgaagcagacggccgagacgttgacaccttcggcgcggcatctctcgagagttccgctccggcgctccacctccaccgctggcggtttcttattccgttccgttccgcctcctgctctgctcctctccacaccacacggcacgaaaccgttacggcaccggcagcacccagcacgggagaggggattcctttcccaccgttccttccctttccgccccgccgctataaatagccagccccatccccagcttttttccccaatctcatctcctctctcctgttgttcggagcacacgcacaatccgatcgatccccaaatccccttcgtctctcctcgcgagcctcgtggatcccagcttcaaggtacggcgatcgatcatcccccctccttctctctaccttcttttctctagactacatcggatggcgatccatggttagggcctgctagtttcccttcctgttttgtcgatggctgcgaggcacaatagatctgatggcgttatgacggctaacttgtcatgttgttgcgatttatagtccctttaggagatcagtttaatttctcggatggttcgagatcggtggtccatggttagtaccctaagatccgcgctgttagggttcgtagatggaggcgacctgttctgattgttaacttgtcagtacctgggaaatcctgggatggttctagctcgtccgcagatgagatcgatttcatgatcctctgtatcttgtttcgttgcctaggttccgtctaatctatccgtggtatgatgtagatgttttgatcgtgctaactacgtcttgtaaagttaattgtcaggtcataatttttagcatgcctttttttttgtttggttttgtctaattgggctgtcgttctagatcagagtagaagactgttccaaactacctgctggatttattgaacttggatctgtatgtgtgtcacatatcttcataaattcatgattaagatggattgaaatatcttttatctttttggtatggatagttctatatgttggtgtggctttgttagatgtatacatgcttagatacatgaagcaacgtgctgctactgtttagtaattgctgttcatttgtctaataaacagataaggatatgtatttatgttgctgttggttttgctggtactttgttggatacaaatgcttcaatacagaaaacagcatgctgctacgatttaccatttatctaatcttatcatatgtctaatctaataaacaaacatgcttttaaattatcttcatatgcttggatgatggcatacacagcggctatgtgtggttttttaaatacccagcatcatgggcatgcatgacactgctttaatatgctttttatttgcttgagactgtttcttttgtttatactgaccctttagttcggtgactcttctgcaggtcgactttaacttagcctaggatccatggcccagtccaagcacggcctgaccaaggagatgaccatgaagtaccgcatggagggctgcgtggacggccacaagttcgtgatcaccggcgagggcatcggctaccccttcaagggcaagcaggccatcaacctgtgcgtggtggagggcggccccttgcccttcgccgaggacatcttgtccgccgccttcatgtacggcaaccgcgtgttcaccgagtacccccaggacatcgtcgactacttcaagaactcctgccccgccggctacacctgggaccgctccttcctgttcgaggacggcgccgtgtgcatctgcaacgccgacatcaccgtgagcgtggaggagaactgcatgtaccacgagtccaagttctacggcgtgaacttccccgccgacggccccgtgatgaagaagatgaccgacaactgggagccctcctgcgagaagatcatccccgtgcccaagcagggcatcttgaagggcgacgtgagcatgtacctgctgctgaaggacggtggccgcttgcgctgccagttcgacaccgtgtacaaggccaagtccgtgccccgcaagatgcccgactggcacttcatccagcacaagctgacccgcgaggaccgcagcgacgccaagaaccagaagtggcacctgaccgagcacgccatcgcctccggctccgccttgccctccggactcagatctcgatagggtaccaatggccagttaacagatccagctgctgctgttctagggttcacaagtctgcctatttgtcttccccaatggagctatggttgtctggtctggtccttggtcgtgtcccgtttcattgtgtactatttacctgtaatgtgtatccttaagtctggtttgatggtgtctgaaacgttttgctgtggtagagcagcatggaagaactataatgaataagtgatccctaatcattgtgtccaaattttgcttctgctatacccttttgtgctgtttcttatgttttgcttaaaaatttgatctgacaaacaaatttgtctaaattatgctcttgttctgactgtgtactgtacacatttgtattgctaccggtttggcacatagttttctctttgattgcagatcaaacccttctgattgcagattgcttggctatggctgatgtgctcactgttcttctttagcttgtatattgctgatggtggcttggctacggctgaaaaagttgctgctgcgccgacttggcaactgttgctccagtaatgctttgtcctctcttcctagccgccgacttggcacttggcagctgttgctcctgtaatgcgttgttatctcttatctcttgagatgtactatgattttgaggctgtttgacttgtgccagattgccagtgctgatgctatattatctcaggtttttatgctagtatatgttttactgtgtgctgcctgtgtcgagttacgtaatctattgaaccgctatgcgtgttgatgccctgttgttgcttgccagattgatgcccctgttgcttgcagcttgcaagctgtagtgaaatcctaaaattcgaaaccaaatctattctgaacttttgaagatctgtgatgtccggaagaaaagattcaaacagataaacgggactctccagaatctataaaataaatgatcgacaaacgctttgctttggtaggcttcctagttagttagcggaccgaagcttcggtccgggcctagaaggccagcttcggccgccccatttcaaatatttttttcaaaataaaagaatgtagtatatagcaattgcttttctgtagtttataacttcgtatagcatacattatacgaagttatacttttctaatatatgaccaaaatttgttgatgtgcaggtcttcgcctaccccggcggcgcgtccatggagatccaccaggcactcacccgctcccccgtcatcgccaaccacctcttccgccacgagcaaggggaggcctttgccgcctccggctacgcgcgctcctcgggccgcgtcggcgtctgcatcgccacctccggccccggcgccaccaacctagtctccgcgctcgccgacgcgctgctcgattccgtccccatggtcgccatcacgggacaggtggcgcgacgcatgattggcaccgacgccttccaggagacgcccatcgtcgaggtcacccgctccatcaccaagcacaactacctggtcctcgacgtcgacgacatcccccgcgtcgtgcaggaggctttcttcctcgcctcctctggtcgaccagggccggtgcttgtcgacatccccaaggacatccagcagcagatggcggtgcctgtctgggacaagcccatgagtctgcctgggtacattgcgcgccttcccaagccccctgcgactgagttgcttgagcaggtgctgcgtcttgttggtgaatcgcggcgccctgttctttatgtgggcggtggctgcgcagcatctggtgaggagttgcgacgctttgtggagctgactggaatcccggtcacaactactcttatgggcctcggcaacttccccagcgacgacccactgtctctgcgcatgctaggtatgcatgggacggtgtatgcaaattatgcagtggataaggccgatctgttgcttgcacttggtgtgcggtttgatgatcgcgtgacagggaagattgaggcttttgcaagcagggctaagattgtgcacgttgatattgatccggctgagattggcaagaacaagcagccacatgtgtccatctgtgcagatgttaagcttgctttgcagggcatgaatgctcttcttgaaggaagcacatcaaagaagagctttgactttggctcatggaacgatgagttggatcagcagaagagggaattcccccttgggtataaaacatctaatgaggagatccagccacaatatgctattcaggttcttgatgagctgacgaaaggcgaggccatcatcggcacaggtgttgggcagcaccagatgtgggcggcacagtactacacttacaagcggccaaggcagtggttgtcttcagctggtcttggggctatgggatttggtttgccggctgctgctggtgcttctgtggcaaacccaggtgtcactgttgttgacatcgatggagatggtagctttctcatgaacgttcaggagctagctatgatccgaattgagaacctcccagtgaaggtctttgtgctaaacaaccagcacctggggatggtggtgcagttggaggacaggttctataaggccaacagagcgcacacatacttgggaaacccagagaatgaaagtgagatatatccagatttcgtgacgatcgccaaagggttcaacattccagcggtccgtgtgacaaagaagaacgaagtccgcgcagcgataaagaagatgctcgagactccagggccgtacctcttggatataatcgtcccacaccaggagcatgtgttgcctatgatccctagtggtggggctttcaaggatatgatcctggatggtgatggcaggactgtgtactgatgactagctagtcagttaacagatctgccagatcctcggtgtacaaataacccgtcttatcctatgagacgggccggcgtcagtgtgttctggaggaatttttatgtcagagcctttttctttgtgtgcttgatgtagatgccaagggaagcttattggctgttgaagcttgatgcaaaataaattatggaactctgttttttgtttatctaataataactagcaaatatgcttccattgcattgaaactaacagccttttgtgtttccaagttttattttgtgacaatgtcatctatttcaattagttgtggaatcggaaacttgcaggactaacttggaaactccaatccctcagcatcctggactttttcctggtgtaatccatgtagatattattttaatcatcattttagttctggaggtttttccatctccggttttgctcccctttcttcaaaaaaaaaaaaaaaatgccgtaggcgccgcaacgcccacctgttgttcaaactcatgggcacgagtggctcgaagattttatacaacaattgctgtagtttcaccgttgctggtgaagaagcatttttttaaaaaaatatagtggtattcattttaattagtttagttgtgcagcgagcaaaatttggacatgctctgctcggaatctgatcgacctagacacagattagcagcagtagctttgtcatctgttccaagagttgcgatctgatagaagaaaaaaaaaccttcccttcaatgtaaaaccgaaactaacaagaaagaagcacagtgccgtttaggcaagtatggagtacgtattaagcatgtagaaggccatgcatgaaccactaacaagaaagaagcgcagtgccattcaggcaagcataagcatgtagattggcatgcatgaacaactaacagtagatcgtctctggtctgattagaagttttttgggaagccaagaaatcatgtacaactggttccatctcaaattccgtggcaaaaagaggcctaagcaacataaagctttccactggttgccatatatgatttgggcatttcactttgatcttaatgggccttgtaaagcccaagactcatgattatctttagttgatgctcttaattaggtgtgggcaaataattcaaactgtatgtacccgaccaaaaccaaagcaaaaataatcgaaccaaaccgaaaatttaaaaataaccgaatgaaaactaaatcctataactgaaagaactgaaaccgaatcaaaatatttaatgtaaccaaaaatatccgaaatataattatattgtcaaaaatattaataatttctagattaaataattaaaaatacttaaaaatttatataaaatagtaaaaatactcgaaaataaccacaaatattcaaaaacaaccgaaatatcccaaaatattcaaagcaaaataaccgaatggataccaaattttaaaaccgaaaaaactggaacaaaaccaaaatcgaaccaaaatttcaaaaatcgaataaatactaaactttagaacaaaaaaaaacgataaccgaatgtatacgaaccaaagccgaattagataaccgaacgtccaggactactcttaatctttccgccacttatgatttgggctattactttgtttataatgagccttttcaagctcaagttcatgattgtccgtgagatgagaaactgacttgttggattcgaaaccctagctagtattggttaatacttaatacataaatgacctgcattgacatcatcatccaagaaaataaaaattgtatgcttgagatatttagttttcctagctaggttttctttattttagtaccgaatctttaggtgtgccacgttaatttagacccattttttcatacttaccaactgagtctagtttaatcatgactataatcgtataaaatgattcagtcgacgtcattgcgaacgtatataaaatcatccaaattgacgtcattccaaagaggtaagcatgcttatctaagagtccgagcatactaaacaagacgacattttatttgcactccaaatcaaattttgtattgcctaaagaaaaacaatcaaactcaagtttcttaaaattaatttcattcaaactaatcactttcaatatctcacatattattcatgccatttctatttgtctaaacatgatttaaaaaaaaaagtaaaatacaaagattactatgcaaaaactctataaaaaaaaattcaaatttcttatttatttgtgacatcaaattttcaaaataatttttttaattatcggttgatccggtcagtcgataaaaacataaactttcagcgaccgttaaaactttcctactaccgatttagagaaaatcttagcttgaaacgtaattgtaacctgccttcatgcaagtcgcaagatatgtcatcctaagttgtatatgttttctcaaaagatgtatttacttgagaaaatacgtttcaacgttgatggacaaccaattaagaatcaagcacctttcgtaatcaatttaggcttatcgtctaaggtatactgatttacgacagttgactagacttataaggaacaaaataatagaatagtttctaaacacttcacctaatcatagagactaagatggtaattcgtaaacgacaaagcctagtgacactgtccattgtaaaattccacatcatattagtattaaacatatacatgtagtttcctgaacacatgtagtatcaaacacacttcgtggcttcttcctcgaaacctgcggccgctcattaattaagtcatctagttgaaggatcgctatcaactttgtatagaaaagttgggccgaattcgagctcggtacggccagaatggcccggaccgaagcttaccggtcgttgagaacaaatctggaaggccatccttgccttctgtcgtcgggcgcaccggacagtccggtgcacaccggacactgtccggtgcccgatttccttccttaaacatcgcagccgaccgttgccaaccgttgcagatctggcgcaccggacagtccggtgcacaccggacagtccggtgccactttccgaccgttggccagaccacgtgtcgcgcgcagatttcgcggccgaccgttggctcgggccgaccgttggctcaccggaaagtccggtgcacaccggacagtccggtgaattttagccgtacgccgtcggcaaattcccgagagcagcgtcttcaggtcgaggcagcctggcgcaccggacactgtccggtgcaccaccggagagtccggtgccccagaccgaagcagtcttttggctgtacacagccaactcttcttctttcttcttctctctgtttctattacttagacaagtatattagtacacaaaaccaatgtactaaggcttagaaacatacctttacttgtgatttgcactttgttcatccatgggcatagatttacatttaagcacttgtgttgacactcaatcaccaaaatacttagaaatggcccaaaggcacatttccctttcagtctttcatcgaacatcatggtcacgttcttcataccataaaaactagcattcccataaacatttgtctccacgcttcctccatggtatagtgtcactagggtgtccatctattgcaaacatggattactaactcaataatggctaaatactagtgcctcaatacttactaagtagtaaataaataataactgcttactatatagtaaatattaaatgaccacattaaccgaaattacataatctatgaataatgtacgaaaacaatgtatacatgagatcgcgtacgagtccagctaacggtggagaaggtcaagtcggaaggacacctatatacaaaaaatactattgtcaataaaaaatcggcagcacctcccctataaagtgatgtttctaaaacctacaaagaaataacaacacgatggttgccaacacagaaaactgctaccaacaagtatatgttaaaccctatataatcactcactttcctccatccattacactaacaatatgctaccgacttactaactatataatcactaactatatacacgaacaaataaatacctagctaactatttataataacaaatgaatagctaacagactatacattaaaccaagtaatcttgtgctacaaatttatttttcagacagaaaaatctatttagctaactaattaatacaaattaataccaagcaacgatagatgaacatctagttgtctaattagctaactaattaatacaaattaagtagaatccttaccgtggggagatggggcgcgacgaagtgctcgagcttggggcgcggcgaccggcgacgtgaagcttgggggcgcgggggccggacggcgctgcgggcggcatggcgggcggctgcgggcggcggcgcgggcgcaggaaacaaacgacgggagtgggaggaaggagaaagcggcgcgccggtttagtcctagctcggcgccaagatctgtggcgccgagctaggtgccacgatggccgccgcgtcagcaaagctcggcgccaaggcatgttgcgccgagccgtgttagctcggcgtcatagctcatggtgccgagttttgggtctaaaattgcgtttaagtattctagggatctaaacgcaaatatttttcgaaaatagggccgaaaaacaaaaaaaaatcggtcgtttcgtcgagcacatcgtccagcctatcttgcatgtccatcctctctatggttcgcgagccgcgcgcatggcgctccaaaggaggggcgaggttgaatatagacagatggaatgggtggttctctatttatagcgcatgcagtcgtcccctggcacacctatttatatgtgagcgttcctggcactagagagatcgatcgatcgagcttaattgcgccactgctcgttatcctcctcttgcattgcattgcaggtcgtagttgagcagcagcaaccactgcacaggcctaggcgcgccatttaaatatggaccaccacctcacgccgacgccgccgccgccgccgccgccgatggggaactccgcggcgggggcgtcctcgaagccgccgacgccggcgtccacgcccaactcgcgcctcgcctcggcgccgtcctcccgccacgccgccacgccgccgcacgcgtcggcggcggcgtccgccccggcgccggcctcgcgcaccgtctacagcgaccgcttcatccccagccgcaccggatccaacctcgcgctcttcgacctcgccccctcgccctcctccgccgcctcgtcctcgcactcgcacgacgccggccccgcggcctcgtccggatctgcgcagcccgccgcgtcgccctactgcacgctcctccgcgccgcgctcttcggccccgacacgcccgaccgcgtcgcgtcctcggccgccgcgtgctcctcgtcgtcgtcctccttctccccggggccctcgcctgtcggcacccccgccaccgggaacatcttcagattcaagacggaggtgcgccggaacgccaagagggcgcttttttcgggagaccaagaggaggacgcgctgttccccggcattttcaccaccaggggcgcgggaccaaggaaggtgccaaggtcgccgtacaaggtgctggatgcgcccgctttgcaggacgacttctacctcaacctcgtcgattggtcttcacataacgtccttgctgtcgggttgggcaattgcgtttacttgtggaatgcatgcagcagcaaggtcaccaagctttgtgatttgggggtggatgacaatgtttgctctgtggggtgggcgcagcgcggcactcacctagctgtaggcacaaagcaaggaaaagttcagatctgggatgcaactcgttgtaaaagaataagaactatggaaagccatcgcatgcgtgtaggtgctcttgcatggagttcttctttgctttcttctggaagccgtgacaagagcatcctccaccatgatatccgtgctcaagaagattatgttagcaagcttaccgggcataaatctgaggtttgtggactcaagtggtcttatgacaatcgtcagcttgcatccggaggcaatgacaatggactttttgtttggaatccacattcagtacaaccagtactgaagtatactgagcacacagcagctgtcaaagctattgcctggtcacctcatctccacggcctgcttgcatctggtggaggaactgcagatagatgcatacgattctggaatacgaccacaaatacacacttgagttgtgtggacactggcagccaggtctgcaatcttgcgtggtcaaagaatgtgaatgagcttgttagcacccacgggtactcccagaaccagataattgtttggagatatccaacaatgtcgaagcttgccactttgacagggcacacgtaccgagtattgtatttagctatttcccctgacggccagaccatagttactggtgccggtgacgaaacactccgtttttggaacgtgttcccctctccaaagtcccagagctctgatagtctaagttgcatcgggggtacatcgtttgttagaagctacatccggatttaaatgcccgggcgatcgctcgaggcgtacctagtggtaccacatggttaacctagacttgtccatcttctggattggccaacttaattaatgtatgaaataaaaggatgcacacatagtgacatgctaatcactataatgtgggcatcaaagttgtgtgttatgtgtaattactagttatctgaataaaagagaaagagatcatccatatttcttatcctaaatgaatgtcacgtgtctttataattctttgatgaaccagatgcatttcattaaccaaatccatatacatataaatattaatcatatataattaatatcaattgggttagcaaaacaaatctagtctaggtgtgttttgcgaatgcggccgccaccgcggtggagctcgaattccggtccgggcctagaaggccagcttcaagtttgtacaaaaaagcaggctccggccagaatggcccggaccgggttaccgaattcgagctcggtaccctgggatccgatatcgatgggccctggccgaagcttggtcacccggtccgggcctagaaggccgatctcccgggcacccagctttcttgtacaaagtggccgttaacggatcggccagaatggcccggaccgaagcttgcatgcctgcagtgcagcgtgacccggtcgtgcccctctctagagataatgagcattgcatgtctaagttataaaaaattaccacatattttttttgtcacacttgtttgaagtgcagtttatctatctttatacatatatttaaactttactctacgaataatataatctatagtactacaataatatcagtgttttagagaatcatataaatgaacagttagacatggtctaaaggacaattgagtattttgacaacaggactctacagttttatctttttagtgtgcatgtgttctcctttttttttgcaaatagcttcacctatataatacttcatccattttattagtacatccatttagggtttagggttaatggtttttatagactaatttttttagtacatctattttattctattttagcctctaaattaagaaaactaaaactctattttagtttttttatttaataatttagatataaaatagaataaaataaagtgactaaaaattaaacaaataccctttaagaaattaaaaaaactaaggaaacatttttcttgtttcgagtagataatgccagcctgttaaacgccgtcgacgagtctaacggacaccaaccagcgaaccagcagcgtcgcgtcgggccaagcgaagcagacggcacggcatctctgtcgctgcctctggacccctctcgagagttccgctccaccgttggacttgctccgctgtcggcatccagaaattgcgtggcggagcggcagacgtgagccggcacggcaggcggcctcctcctcctctcacggcaccggcagctacgggggattcctttcccaccgctccttcgctttcccttcctcgcccgccgtaataaatagacaccccctccacaccctctttccccaacctcgtgttgttcggagcgcacacacacacaaccagatctcccccaaatccacccgtcggcacctccgcttcaaggtacgccgctcgtcctcccccccccccctctctaccttctctagatcggcgttccggtccatgcatggttagggcccggtagttctacttctgttcatgtttgtgttagatccgtgtttgtgttagatccgtgctgctagcgttcgtacacggatgcgacctgtacgtcagacacgttctgattgctaacttgccagtgtttctctttggggaatcctgggatggctctagccgttccgcagacgggatcgatttcatgattttttttgtttcgttgcatagggtttggtttgcccttttcctttatttcaatatatgccgtgcacttgtttgtcgggtcatcttttcatgcttttttttgtcttggttgtgatgatgtggtctggttgggcggtcgttctagatcggagtagaattctgtttcaaactacctggtggatttattaattttggatctgtatgtgtgtgccatacatattcatagttacgaattgaagatgatggatggaaatatcgatctaggataggtatacatgttgatgcgggttttactgatgcatatacagagatgctttttgttcgcttggttgtgatgatgtggtgtggttgggcggtcgttcattcgttctagatcggagtagaatactgtttcaaactacctggtgtatttattaattttggaactgtatgtgtgtgtcatacatcttcatagttacgagtttaagatggatggaaatatcgatctaggataggtatacatgttgatgtgggttttactgatgcatatacatgatggcatatgcagcatctattcatatgctctaaccttgagtacctatctattataataaacaagtatgttttataattattttgatcttgatatacttggatgatggcatatgcagcagctatatgtggatttttttagccctgccttcatacgctatttatttgcttggtactgtttcttttgtcgatgctcaccctgttgtttggtgttacttctgcaggtcgactttaacttagcctaggatccatggcctcctccgagaacgtcatcaccgagttcatgcgcttcaaggtgcgcatggagggcaccgtgaacggccacgagttcgagatcgagggcgagggcgagggccgcccctacgagggccacaacaccgtgaagctgaaggtgaccaagggcggccccctgcccttcgcctgggacatcctgtccccccagttccagtacggctccaaggtgtacgtgaagcaccccgccgacatccccgactacaagaagctgtccttccccgagggcttcaagtgggagcgcgtgatgaacttcgaggacggcggcgtggcgaccgtgacccaggactcctccctgcaggacggctgcttcatctacaaggtgaagttcatcggcgtgaacttcccctccgacggccccgtgatgcagaagaagaccatgggctgggaggcctccaccgagcgcctgtacccccgcgacggcgtgctgaagggcgagacccacaaggccctgaagctgaaggacggcggccactacctggtggagttcaagtccatctacatggccaagaagcccgtgcagctgcccggctactactacgtggacgccaagctggacatcacctcccacaacgaggactacaccatcgtggagcagtacgagcgcaccgagggccgccaccacctgttcctgtagggtaccacatggttaacctagacttgtccatcttctggattggccaacttaattaatgtatgaaataaaaggatgcacacatagtgacatgctaatcactataatgtgggcatcaaagttgtgtgttatgtgtaattactagttatctgaataaaagagaaagagatcatccatatttcttatcctaaatgaatgtcacgtgtctttataattctttgatgaaccagatgcatttcattaaccaaatccatatacatataaatattaatcatatataattaatatcaattgggttagcaaaacaaatctagtctaggtgtgttttgcgaatgcggccgccaccgcggtggagctcgaattccggtccgggcctagaaggccagcttcggccgccccgggcaactttattatacaaagttgatagatcctcatgtcttcatcgtaagcttaaacaggccagaatggcctctggattcagcggcctagaaggccgaagtacttggtcttcctagtcgagtagatcacattcaagcttggtcacccggtccgtcaatattctgattccgatgacttcgtaggttcctagctcaagccgctcgtgtccaagcgtcacttacgattagctaatgattacggcatctaggaccgactagtggcgcgccgactagctagctaaggtaccgagctcgaattcattccgattaatcgtggcctcttgctcttcaggatgaagagctatgtttaaacgtgcaagcgctactagacaattcagtacattaaaaacgtccgcaatgtgttattaagttgtctaagcgtcaatttgtttacaccacaatatatcctgcca

SEQ ID NO: 37 - DNA, 29252 bp, Artificial Sequence
  RX000008
gtttacccgccaatatatcctgtcaaacactgatagtttaaactgaaggcgggaaacgacaatctgatcatgagcggagaattaagggagtcacgttatgacccccgccgatgacgcgggacaagccgttttacgtttggaactgacagaaccgcaacgttgaaggagccactcagcaagctggtacgattgtaatacgactcactatagggcgaattgagcgctgtttaaacgctcttcaactggaagagcggttacgctgtttaaacgctcttcaactggaagagcggttactaccggttcactagctagctgctaatcgagctagttaccctatgaggtgacatgaagcgctcacggttactatgacggttagcttcacgactgttggtggcagtagcgtacgacttagctatagttccggacttacccttaagcgatttaaatctgcggttaccgaattcgagctcggtaccctgggatctgcccttactttaacgcctctaaccaacacccctttatctttataaggaacaataaacagaatttgccccactgttctaaatcacctaataatatccccagctaaaaacaataaaggtttcctagaattaagacaagcatgactgttcctccaggagggtttggaacattgttgcagtcttgcagatacgggcgaagggtgagaaacagagcggagggctggaggtgacctcggtagtcgacgccggagttgagcttgacaacgacggggcggcccctgatggacttgaggaagtccgatggcgtcttcaccgtcccgccggcgcccgaggcgggcctgtcgctgccgccgccgccgctgctcatcttgcgcgctgtgcccccggcggtgtccctgtgttgcggatcgcgggtgggccaggtggatgcgagggcgacccgtttggactccggccggagccgccggatccctggtcggtgtcagtgccgtttactctgggccccacgtgtcagtaccgtctgtagatgacaacaacccgtcgtccacagtcatgtccaaaatatcctttcttcttttttttcgattcggatatctatcttccttttttttttccaaaaatcttcttgacgcaccagcgcgcacgtttgtggtaaacgccgacacgtcggtcccacgtcgatagaccccacccaccagtgagtagcgtgtacgtattcgggggtgacggacgtgtcgccgtcgtcttgctagtcccattcccatctgagccacacatctctgaacaaaaaaaaggagggaggcctccacgcacatccccctccgtgccacccgccccaaaccctcgcgccgcctccgagacagccgccgcaaccatggccaccgccgccgccgcgtctaccgcgctcactggcgccactaccgctgcgcccaaggcgaggcgccgggcgcacctcctggccacccgccgcgccctcgccgcgcccatcaggtgctcagcggcgtcacccgccatgccgatggctcccccggccaccccgctccggccgtggggccccaccgagccccgcaagggtgctgacatcctcgtcgagtccctcgagcgctgcggcgtccgcgacgtaagtttctgcttctacctttgatatatatataataattatcattaattagtagtaatataatatttcaaatatttttttcaaaataaaagaatgtagtatatagcaattgcttttctgtagtttataacttcgtatagcatacattatacgaagttatacttttctaatatatgaccaaaatttgttaccgaattcaggcgacccatcgctgctttgtctacatcatgttcttcatcatcctccccaggcgacgcgtgctgctgttcttattcagactaccgttcgagtgactgcatggcgtacatctttctgcatcgactttgtacggctacatcgaacatatacacgagatgtctcgtgtgaatagagtcactaatgccttaagcatcggttactccgtagggtacattctgttcttcttatttgtgcatatttttattgttgtttactgattatacgagtagttatacatacatgcacatacatatcatcacatatatcacaatatttttctaaattaaattaaaactaaaaatgactaaatttctaacaccaacgacattgtaatgttttctccaacaactttacctattctacattgttctatttcgaatttcactctataaacaacatagtctacaatggaaaacagtgctttgtacgactatatacgcgatgtgtggctacaacataagacaatatagtcgtttgaagattgaacctatatatcggtacggttaatccgtctatgtacgtgggcatgacgaacacccgtgataacgaaggattaacgtgcacaatcataaatccaaagtaggagcggtgcatgatgagaatcgctctcagtactcgacataatgaaccttacgaggtacaacaggcaggcaggcagggaccaggggccgcctttatttcaggctcgctggccccacgggcgtgctgcgtgcacgaagggcactaccccaacctctcaccgaaaaccgcgctggatcggcaaatcaaacgaggtggtgccccgtgcccactctccacgtccacggcaccatccctctgcagccgctcaccagccatgccgtgtcgcggaacggcacaaccacccccaacccactcacgaaaccccgtcccggccgtgcccgtgtcggtccgcgctcggcaacgaggcggcccgcgctgctgagtcccctggacacccgacaccctgtcggccctttgtttattcatcccgaaatctcatctgcccccacggccgactgcgctgcgccgcccggatatatatacccatcgttatcgatcgactggggactctatcagtgatagagtctagaggatcgctcaggaaggccgctgagatagaggcatggcggccaatgcgggcggcggtggagcgggaggaggcagcggcagcggcagcgtggctgcgccggcggtgtgccgccccagcggctcgcggtggacgccgacgccggagcagatcaggatgctgaaggagctctactacggctgcggcatccggtcgcccagctcggagcagatccagcgcatcaccgccatgctgcggcagcacggcaagatcgagggcaagaacgtcttctactggttccagaaccacaaggcccgcgagcgccagaagcgccgcctcaccagcctcgacgtcaacgtgcccgccgccggcgcggccgacgccaccaccagccaactcggcgtcctctcgctgtcgtcgccgccgccttcaggcgcggcgcctccctcgcccaccctcggcttctacgccgccggcaatggcggcggatcggctgtgctgctggacacgagttccgactggggcagcagcggcgctgccatggccaccgagacatgcttcctgcaggactacatgggcgtgacggacacgggcagctcgtcgcagtggccacgcttctcgtcgtcggacacgataatggcggcggccgcggcgcgggcggcgacgacgcgggcgcccgagacgctccctctcttcccgacctgcggcgacgacggcggcagcggtagcagcagctacttgccgttctggggtgccgcgtccacaactgccggcgccacttcttccgttgcgatccagcagcaacaccagctgcaggagcagtacagcttttacagcaacagcaacagcacccagctggccggcaccggcaaccaagacgtatcggcaacagcagcagcagccgccgccctggagctgagcctcagctcatggtgctccccttaccctgctgcagggagtatgtgagagcaacgcgagctgccactgctcttcactggtaccgttaacagatcattcgacaaagcagcattagtccgttgatcggtggaagaccactcgtcagtgttgagttgaatgtttgatcaataaaatacggcaatgctgtaagggttgttttttatgccattgataatacactgtactgttcagttgttgaactctatttcttagccatgccaagtgcttttcttattttgaataacattacagcaaaaagttgaaagacaaaaaaaaaaacccccgaacagagtgctttgggtcccaagcttctttagactgtgttcggcgttccccctaaatttctccccctatatctcactcacttgtcacatcagcgttctctttccccctatatctccacgctctacagcagttccacctatatcaaacctctataccccaccacaacaatattatatactttcatcttcaactaactcatgtaccttccaatttttttctactaataattatttacgtgcacagaaacttagcaaggagagagagagcggggtgacccaccttgctagttggatattacctcttctcttcaaagtatccttgaacgctcaccggttatcaaatctctacactatagctctgtagtcttgctagatagttagttctttagctctcggtgaccaagcttggcgcgatcaagcttatcgataccgtcgacctcgaagcttggtcacccggtccgggcctagaaggccagcttcaagtttgtacaaaaaagcaggctccggccagaatggcccggaccgggttaccgaattcttaccctagctccctgcggctgttacgcggtcccccatcaatcttctgttcttgcggttgtagcctgtgtaacagtgctagagtatgtatgataaataggttttaagtctgcttacatgacattttttattgtggaagagacatataaaaattagagagagtggttctcatgcaacggcggacggcccggtgctaaaagagcttcaagacaaaataatgaaacaggaagagagtagatttatctaagagccaactttattatatgaatgtgtttattgttggctttagatgatatggtaaggagttagagctaataatagataggctctattattattattattaattaaactcgctctaaggaggaaagtgggaggaagggacgaggacgaagactactggaagcatcgtgcatggatgatggatgtggtgtctcttaatgtaggtggccggaggatgtacgtgttaattgcgcgataagcactcagatccaaccgcaaactacctccacactgacacactgatagagagaaagagagacctccgacgactgccgccgcagatgagccacgtacgtatacgacgtctgccggccggctcaggctgccgccatcaccctgctcgaaagtcgcgttaggcggcgccagctacataggagtatctagtctagccagttagtatactactactgcgctgatgatgaattaactctgcatagatactgtacttgcctccctccaacacccaaccacctcctgctcggctcttaataacttggacacggatcgatgccatccaaggaagaacacgacgacgacgacggaacatccaccatgcaagcttgcatccatacgccgatacgcgtgcatccatccatccaccattatttccattttccaccgatcacacgtacacaggcctatttaaggagcgacatcccactgcaactctcctcaccactcatcaccagctagctctagcaaagcacttgccatctaccgaccgccgcattccaaacagcccgacgagctagcagagcggcaggcacctccctcctcaaggaacccatggccactgtgaacaactggctcgctttctccctctccccgcaggagctgccgccctcccagacgacggactccacactcatctcggccgccaccgccgaccatgtctccggcgatgtctgcttcaacatcccccaagattggagcatgaggggatcagagctttcggcgctcgtcgcggagccgaagctggaggacttcctcggcggcatctccttctccgagcagcatcacaaggccaactgcaacatgatacccagcactagcagcacagtttgctacgcgagctcaggtgctagcaccggctaccatcaccagctgtaccaccagcccaccagctcagcgctccacttcgcggactccgtaatggtggcttcctcggccggtgtccacgacggcggtgccatgctcagcgcggccgccgctaacggtgtcgctggcgctgccagtgccaacggcggcggcatcgggctgtccatgattaagaactggctgcggagccaaccggcgcccatgcagccgagggtggcggcggctgagggcgcgcaggggctctctttgtccatgaacatggcggggacgacccaaggcgctgctggcatgccacttctcgctggagagcgcgcacgggcgcccgagagtgtatcgacgtcagcacagggtggagccgtcgtcgtcacggcgccgaaggaggatagcggtggcagcggtgttgccggcgctctagtagccgtgagcacggacacgggtggcagcggcggcgcgtcggctgacaacacggcaaggaagacggtggacacgttcgggcagcgcacgtcgatttaccgtggcgtgacaaggcatagatggactgggagatatgaggcacatctttgggataacagttgcagaagggaagggcaaactcgtaagggtcgtcaagtctatttaggtggctatgataaagaggagaaagctgctagggcttatgatcttgctgctctgaagtactggggtgccacaacaacaacaaattttccagtgagtaactacgaaaaggagctcgaggacatgaagcacatgacaaggcaggagtttgtagcgtctctgagaaggaagagcagtggtttctccagaggtgcatccatttacaggggagtgactaggcatcaccaacatggaagatggcaagcacggattggacgagttgcagggaacaaggatctttacttgggcaccttcagcacccaggaggaggcagcggaggcgtacgacatcgcggcgatcaagttccgcggcctcaacgccgtcaccaacttcgacatgagccgctacgacgtgaagagcatcctggacagcagcgccctccccatcggcagcgccgccaagcgcctcaaggaggccgaggccgcagcgtccgcgcagcaccaccacgccggcgtggtgagctacgacgtcggccgcatcgcctcgcagctcggcgacggcggagccctggcggcggcgtacggcgcgcactaccacggcgccgcctggccgaccatcgcgttccagccgggcgccgccagcacaggcctgtaccacccgtacgcgcagcagccaatgcgcggcggcgggtggtgcaagcaggagcaggaccacgcggtgatcgcggccgcgcacagcctgcaggacctccaccacctgaacctgggcgcggccggcgcgcacgactttttctcggcagggcagcaggccgccgccgctgcgatgcacggcctgggtagcatcgacagtgcgtcgctcgagcacagcaccggctccaactccgtcgtctacaacggcggggtcggcgacagcaacggcgccagcgccgtcggcggcagtggcggtggctacatgatgccgatgagcgctgccggagcaaccactacatcggcaatggtgagccacgagcaggtgcatgcacgggcctacgacgaagccaagcaggctgctcagatggggtacgagagctacctggtgaacgcggagaacaatggtggcggaaggatgtctgcatgggggactgtcgtgtctgcagccgcggcggcagcagcaagcagcaacgacaacatggccgccgacgtcgggcatggcggcgcgcagctcttcagtgtctggaacgacacttaagcgtacctagtggtacctgacatcttatagtctgcaacctctcgtgtctgaattcctatctttatcaagtgttattgcttccacgactataggacagctttcgtcgaaagcttttgctcatgtgatctcgaaggattcatctagtctgatttttcgtgacttgtatcggttttattggattcatccaacatatatcaataaaaaatgagttgtgtttcctttcttcctagttcagttaaaattatttccctcctgcgcttgtgctgtaattgtctgtgtacctgttgtttgtgactgtgttagttcccttggatatgatttcgtatttgatatgtacatggagatagcttagcttcattattggagtatgaagttagtatgacatagtcactctcctggaaaattgacactgcaaaccatatttttattctgaaccacaaatcctagtcagtccgctggcatatgccgtccgtttgctgaatccagaacgtgggtttggagatgtacggctgagatgcctctatgcgaaggggatttcgtggtgaaacgagatgggagtagagcaacgcccgtggaagatgcttcaaacttccacacttttgagcaacgatcggcagtagtaaggtagacgatttcaagatcaaagcatatgaagataaacaacatcaacaacaaaatttgttggggttctatagagagaaacagagctacatacatacactgttttgtatctaccatctgagatgatgaaaagatgaaaaactaaagaatgccccggcgccaacgccaggacacgccgcgcgcgcgtcacccgagccatctcttgacccagccggcgctgtatatttacacacgttgcagcatcgatcaccacctgttcgatcgcgtcgccgtcaccgggatctgagtcgaaacctagacttgtccatcttctggattggccaacttaattaatgtatgaaataaaaggatgcacacatagtgacatgctaatcactataatgtgggcatcaaagttgtgtgttatgtgtaattactagttatctgaataaaagagaaagagatcatccatatttcttatcctaaatgaatgtcacgtgtctttataattctttgatgaaccagatgcatttcattaaccaaatccatatacatataaatattaatcatatataattaatatcaattgggttagcaaaacaaatctagtctaggtgtgttttgcgaatgcgaccttcttatgtgcttctagtctccaaatgtggttgatagttattttgctctaagatcaacagtaatgaagtataaatcatcgttgtggtgtgctactcggttaattgagcattaacacacacaaacatgacgaggatggtataatctccaaaaatgtgtactttgttaggtgggaccctatagccttgattaatgtgctatgttaggcatgcctggaaacgtgtgacgcatatgttttgtgaacctgttgatattatatgtgcttttatattaccatattttattaaaatactaatatttattactagtaagatataacattctatctagcttaaaaactaaccataaatattccataataactagatttaccaaactaatatactaaatatacataataaatacaaaattaacaagacaataatcaatatttatgagcttaatatatttagacattatggttggtcgacgataatcatgctaacttttcgtaattgcttgattgaaatatgcttagaataatgcctctttgttctacatggcaaatagggaccattatggtgtaacaccctgggaaccacaaacaccccgaaatgctactaaactacacaactaaccttcatatataaaatttcgacagcatctcctttgaaaatttgcatagacgtggaagcaacagagtataaacagatatcatgataagaaaacatactagacattaataatctgctagaaatgggaagaatcctaacttgacgactgcgtaactgactagagtcacacttagctgaccctagtcacttacaactgacttcgtgtcctagatcgatgggccctggccgaagcttggtcacccggtccgggcctagaaggccagcttcaagtttgtaccctggagcttgccgagtgccatccttggacactcgataaagtatattttattttttttattttgccaaccaaactttttgtggtatgttcctacactatgtagatctacatgtaccattttggcacaattacatatttacaaaaatgttttctataaatattagatttagttcgtttatttgaatttcttcggaaaattcacatttaaactgcaagtcactcgaaacatggaaaaccgtgcatgcaaaataaatgatatgcatgttatctagcacaagttacgaccgatttcagaagcagaccagaatcttcaagcaccatgctcactaaacatgaccgtgaacttgttatctagttgtttaaaaattgtataaaacacaaataaagtcagaaattaatgaaacttgtccacatgtcatgatatcatatatagaggttgtgataaaaatttgataatgtttcggtaaagttgtgacgtactatgtgtagaaacctaagtgacctacacataaaatcatagagtttcaatgtagttcactcgacaaagactttgtcaagtgtccgataaaaagtactcgacaaagaagccgttgtcgatgtactgttcgtcgagatctctttgtcgagtgtcacactaggcaaagtctttacggagtgtttttcaggctttgacactcggcaaagcgctcgattccagtagtgacagtaatttgcatcaaaaatagctgagagatttaggccccgtttcaatctcacgggataaagtttagcttcctgctaaactttagctatatgaattgaagtgctaaagtttagtttcaattaccaccattagctctcctgtttagattacaaatggctaaaagtagctaaaaaatagctgctaaagtttatctcgcgagattgaaacagggccttaaaatgagtcaactaatagaccaactaattattagctattagtcgttagcttctttaatctaagctaaaaccaactaatagcttatttgttgaattacaattagctcaacggaattctctgtttttctaaaaaaaaactgcccctctcttacagcaaattgtccgctgcccgtcgtccagatacaatgaacgtacctagtaggaactcttttacacgctcggtcgctcgccgcggatcggagtccccggaacacgacaccactgtggaacacgacaaagtctgctcagaggcggccacaccctggcgtgcaccgagccggagcccggataagcacggtaaggagagtacggcgggacgtggcgacccgtgtgtctgctgccacgcagccttcctccacgtagccgcgcggccgcgccacgtaccagggcccggcgctggtataaatgcgcgccacctccgctttagttctgcatacagccaacccaaggatgtccaacctgctcacggttcaccagaaccttccggctcttccagtggacgcgacgtccgatgaagtcaggaagaacctcatggacatgttccgcgacaggcaagcgttcagcgagcacacctggaagatgctgctctccgtctgccgctcctgggctgcatggtgcaagctgaacaacaggaagtggttccccgctgagcccgaggacgtgagggattaccttctgtacctgcaagcgcgaggtttgtttctgcttctacctttgatatatatataataattatcattaattagtagtaatataatatttcaaatatttttttcaaaataaaagaatgtagtatatagcaattgcttttctgtagtttataagtgtgtatattttaatttataacttttctaatatatgaccaaaacatggtgatgcctaggtctggcagtgaagaccatccagcaacaccttggacaactgaacatgcttcacaggcgctccggcctcccgcgccccagcgactcgaacgccgtgagcctcgtcatgcgccgcatcaggaaggaaaacgtcgatgccggcgaaagggcaaagcaggccctcgcgttcgagaggaccgatttcgaccaggtccgcagcctgatggagaacagcgacaggtgccaggacattaggaacctggcgttcctcggaattgcatacaacacgctcctcaggatcgcggaaattgcccgcattcgcgtgaaggacattagccgcaccgacggcggcaggatgcttatccacattggcaggaccaagacgctcgtttccaccgcaggcgtcgaaaaggccctcagcctcggagtgaccaagctcgtcgaacgctggatctccgtgtccggcgtcgcggacgacccaaacaactacctcttctgccgcgtccgcaagaacggggtggctgcccctagcgccaccagccaactcagcacgagggccttggaaggtattttcgaggccacccaccgcctgatctacggcgcgaaggatgacagcggtcaacgctacctcgcatggtccgggcactccgcccgcgttggagctgctagggacatggcccgcgccggtgtttccatccccgaaatcatgcaggcgggtggatggacgaacgtgaacattgtcatgaactacattcgcaaccttgacagcgagacgggcgcaatggttcgcctcctggaagatggtgactgagctagacccagctttcttgtacaaagtggccgttaacggatccagacttgtccatcttctggattggccaacttaattaatgtatgaaataaaaggatgcacacatagtgacatgctaatcactataatgtgggcatcaaagttgtgtgttatgtgtaattactagttatctgaataaaagagaaagagatcatccatatttcttatcctaaatgaatgtcacgtgtctttataattctttgatgaaccagatgcatttcattaaccaaatccatatacatataaatattaatcatatataattaatatcaattgggttagcaaaacaaatctagtctaggtgtgttttgcgaattgcggcaagctgttaccgaattcctgcccttaaggccaattgttcaagattcattcaacaattgaaacatctcccatgattaaatcagtataaggttgctatggtcttgcttgacaaagtttttttttgagggaatttcaactaaatttttgagtgaaactatcaaatactgattttaaaaaatttttataaaaggaagcgcagagataaaaggccatctatgctacaaaagtacccaaaaatgtaatcctaaagtatgaattgcattttttttttgtttggacgaaaggaaaggagtattaccacaagaatgatatcatcttcatatttagatcttttttgggtaaagcttgagattctctaaatatagagaaatcagaagaaaaaaaaaccgtgttttggtggttttgatttctagcctccacaataactttgacggcgtcgacaagtctaacggacaccaagcagcgaaccaccagcgccgagccaagcgaagcagacggccgagacgttgacaccttcggcgcggcatctctcgagagttccgctccggcgctccacctccaccgctggcggtttcttattccgttccgttccgcctcctgctctgctcctctccacaccacacggcacgaaaccgttacggcaccggcagcacccagcacgggagaggggattcctttcccaccgttccttccctttccgccccgccgctataaatagccagccccatccccagcttttttccccaatctcatctcctctctcctgttgttcggagcacacgcacaatccgatcgatccccaaatccccttcgtctctcctcgcgagcctcgtggatcccagcttcaaggtacggcgatcgatcatcccccctccttctctctaccttcttttctctagactacatcggatggcgatccatggttagggcctgctagtttcccttcctgttttgtcgatggctgcgaggcacaatagatctgatggcgttatgacggctaacttgtcatgttgttgcgatttatagtccctttaggagatcagtttaatttctcggatggttcgagatcggtggtccatggttagtaccctaagatccgcgctgttagggttcgtagatggaggcgacctgttctgattgttaacttgtcagtacctgggaaatcctgggatggttctagctcgtccgcagatgagatcgatttcatgatcctctgtatcttgtttcgttgcctaggttccgtctaatctatccgtggtatgatgtagatgttttgatcgtgctaactacgtcttgtaaagttaattgtcaggtcataatttttagcatgcctttttttttgtttggttttgtctaattgggctgtcgttctagatcagagtagaagactgttccaaactacctgctggatttattgaacttggatctgtatgtgtgtcacatatcttcataaattcatgattaagatggattgaaatatcttttatctttttggtatggatagttctatatgttggtgtggctttgttagatgtatacatgcttagatacatgaagcaacgtgctgctactgtttagtaattgctgttcatttgtctaataaacagataaggatatgtatttatgttgctgttggttttgctggtactttgttggatacaaatgcttcaatacagaaaacagcatgctgctacgatttaccatttatctaatcttatcatatgtctaatctaataaacaaacatgcttttaaattatcttcatatgcttggatgatggcatacacagcggctatgtgtggttttttaaatacccagcatcatgggcatgcatgacactgctttaatatgctttttatttgcttgagactgtttcttttgtttatactgaccctttagttcggtgactcttctgcaggtcgactttaacttagcctaggatccatggcccagtccaagcacggcctgaccaaggagatgaccatgaagtaccgcatggagggctgcgtggacggccacaagttcgtgatcaccggcgagggcatcggctaccccttcaagggcaagcaggccatcaacctgtgcgtggtggagggcggccccttgcccttcgccgaggacatcttgtccgccgccttcatgtacggcaaccgcgtgttcaccgagtacccccaggacatcgtcgactacttcaagaactcctgccccgccggctacacctgggaccgctccttcctgttcgaggacggcgccgtgtgcatctgcaacgccgacatcaccgtgagcgtggaggagaactgcatgtaccacgagtccaagttctacggcgtgaacttccccgccgacggccccgtgatgaagaagatgaccgacaactgggagccctcctgcgagaagatcatccccgtgcccaagcagggcatcttgaagggcgacgtgagcatgtacctgctgctgaaggacggtggccgcttgcgctgccagttcgacaccgtgtacaaggccaagtccgtgccccgcaagatgcccgactggcacttcatccagcacaagctgacccgcgaggaccgcagcgacgccaagaaccagaagtggcacctgaccgagcacgccatcgcctccggctccgccttgccctccggactcagatctcgatagggtaccaatggccagttaacagatccagctgctgctgttctagggttcacaagtctgcctatttgtcttccccaatggagctatggttgtctggtctggtccttggtcgtgtcccgtttcattgtgtactatttacctgtaatgtgtatccttaagtctggtttgatggtgtctgaaacgttttgctgtggtagagcagcatggaagaactataatgaataagtgatccctaatcattgtgtccaaattttgcttctgctatacccttttgtgctgtttcttatgttttgcttaaaaatttgatctgacaaacaaatttgtctaaattatgctcttgttctgactgtgtactgtacacatttgtattgctaccggtttggcacatagttttctctttgattgcagatcaaacccttctgattgcagattgcttggctatggctgatgtgctcactgttcttctttagcttgtatattgctgatggtggcttggctacggctgaaaaagttgctgctgcgccgacttggcaactgttgctccagtaatgctttgtcctctcttcctagccgccgacttggcacttggcagctgttgctcctgtaatgcgttgttatctcttatctcttgagatgtactatgattttgaggctgtttgacttgtgccagattgccagtgctgatgctatattatctcaggtttttatgctagtatatgttttactgtgtgctgcctgtgtcgagttacgtaatctattgaaccgctatgcgtgttgatgccctgttgttgcttgccagattgatgcccctgttgcttgcagcttgcaagctgtagtgaaatcctaaaattcgaaaccaaatctattctgaacttttgaagatctgtgatgtccggaagaaaagattcaaacagataaacgggactctccagaatctataaaataaatgatcgacaaacgctttgctttggtaggcttcctagttagttagcggaccgaagcttcggtccgggcctagaaggccagcttcggccgccccatttcaaatatttttttcaaaataaaagaatgtagtatatagcaattgcttttctgtagtttataacttcgtatagcatacattatacgaagttatacttttctaatatatgaccaaaatttgttgatgtgcaggtcttcgcctaccccggcggcgcgtccatggagatccaccaggcactcacccgctcccccgtcatcgccaaccacctcttccgccacgagcaaggggaggcctttgccgcctccggctacgcgcgctcctcgggccgcgtcggcgtctgcatcgccacctccggccccggcgccaccaacctagtctccgcgctcgccgacgcgctgctcgattccgtccccatggtcgccatcacgggacaggtggcgcgacgcatgattggcaccgacgccttccaggagacgcccatcgtcgaggtcacccgctccatcaccaagcacaactacctggtcctcgacgtcgacgacatcccccgcgtcgtgcaggaggctttcttcctcgcctcctctggtcgaccagggccggtgcttgtcgacatccccaaggacatccagcagcagatggcggtgcctgtctgggacaagcccatgagtctgcctgggtacattgcgcgccttcccaagccccctgcgactgagttgcttgagcaggtgctgcgtcttgttggtgaatcgcggcgccctgttctttatgtgggcggtggctgcgcagcatctggtgaggagttgcgacgctttgtggagctgactggaatcccggtcacaactactcttatgggcctcggcaacttccccagcgacgacccactgtctctgcgcatgctaggtatgcatgggacggtgtatgcaaattatgcagtggataaggccgatctgttgcttgcacttggtgtgcggtttgatgatcgcgtgacagggaagattgaggcttttgcaagcagggctaagattgtgcacgttgatattgatccggctgagattggcaagaacaagcagccacatgtgtccatctgtgcagatgttaagcttgctttgcagggcatgaatgctcttcttgaaggaagcacatcaaagaagagctttgactttggctcatggaacgatgagttggatcagcagaagagggaattcccccttgggtataaaacatctaatgaggagatccagccacaatatgctattcaggttcttgatgagctgacgaaaggcgaggccatcatcggcacaggtgttgggcagcaccagatgtgggcggcacagtactacacttacaagcggccaaggcagtggttgtcttcagctggtcttggggctatgggatttggtttgccggctgctgctggtgcttctgtggcaaacccaggtgtcactgttgttgacatcgatggagatggtagctttctcatgaacgttcaggagctagctatgatccgaattgagaacctcccagtgaaggtctttgtgctaaacaaccagcacctggggatggtggtgcagttggaggacaggttctataaggccaacagagcgcacacatacttgggaaacccagagaatgaaagtgagatatatccagatttcgtgacgatcgccaaagggttcaacattccagcggtccgtgtgacaaagaagaacgaagtccgcgcagcgataaagaagatgctcgagactccagggccgtacctcttggatataatcgtcccacaccaggagcatgtgttgcctatgatccctagtggtggggctttcaaggatatgatcctggatggtgatggcaggactgtgtactgatgactagctagtcagttaacagatctgccagatcctcggtgtacaaataacccgtcttatcctatgagacgggccggcgtcagtgtgttctggaggaatttttatgtcagagcctttttctttgtgtgcttgatgtagatgccaagggaagcttattggctgttgaagcttgatgcaaaataaattatggaactctgttttttgtttatctaataataactagcaaatatgcttccattgcattgaaactaacagccttttgtgtttccaagttttattttgtgacaatgtcatctatttcaattagttgtggaatcggaaacttgcaggactaacttggaaactccaatccctcagcatcctggactttttcctggtgtaatccatgtagatattattttaatcatcattttagttctggaggtttttccatctccggttttgctcccctttcttcaaaaaaaaaaaaaaaatgccgtaggcgccgcaacgcccacctgttgttcaaactcatgggcacgagtggctcgaagattttatacaacaattgctgtagtttcaccgttgctggtgaagaagcatttttttaaaaaaatatagtggtattcattttaattagtttagttgtgcagcgagcaaaatttggacatgctctgctcggaatctgatcgacctagacacagattagcagcagtagctttgtcatctgttccaagagttgcgatctgatagaagaaaaaaaaaccttcccttcaatgtaaaaccgaaactaacaagaaagaagcacagtgccgtttaggcaagtatggagtacgtattaagcatgtagaaggccatgcatgaaccactaacaagaaagaagcgcagtgccattcaggcaagcataagcatgtagattggcatgcatgaacaactaacagtagatcgtctctggtctgattagaagttttttgggaagccaagaaatcatgtacaactggttccatctcaaattccgtggcaaaaagaggcctaagcaacataaagctttccactggttgccatatatgatttgggcatttcactttgatcttaatgggccttgtaaagcccaagactcatgattatctttagttgatgctcttaattaggtgtgggcaaataattcaaactgtatgtacccgaccaaaaccaaagcaaaaataatcgaaccaaaccgaaaatttaaaaataaccgaatgaaaactaaatcctataactgaaagaactgaaaccgaatcaaaatatttaatgtaaccaaaaatatccgaaatataattatattgtcaaaaatattaataatttctagattaaataattaaaaatacttaaaaatttatataaaatagtaaaaatactcgaaaataaccacaaatattcaaaaacaaccgaaatatcccaaaatattcaaagcaaaataaccgaatggataccaaattttaaaaccgaaaaaactggaacaaaaccaaaatcgaaccaaaatttcaaaaatcgaataaatactaaactttagaacaaaaaaaaacgataaccgaatgtatacgaaccaaagccgaattagataaccgaacgtccaggactactcttaatctttccgccacttatgatttgggctattactttgtttataatgagccttttcaagctcaagttcatgattgtccgtgagatgagaaactgacttgttggattcgaaaccctagctagtattggttaatacttaatacataaatgacctgcattgacatcatcatccaagaaaataaaaattgtatgcttgagatatttagttttcctagctaggttttctttattttagtaccgaatctttaggtgtgccacgttaatttagacccattttttcatacttaccaactgagtctagtttaatcatgactataatcgtataaaatgattcagtcgacgtcattgcgaacgtatataaaatcatccaaattgacgtcattccaaagaggtaagcatgcttatctaagagtccgagcatactaaacaagacgacattttatttgcactccaaatcaaattttgtattgcctaaagaaaaacaatcaaactcaagtttcttaaaattaatttcattcaaactaatcactttcaatatctcacatattattcatgccatttctatttgtctaaacatgatttaaaaaaaaaagtaaaatacaaagattactatgcaaaaactctataaaaaaaaattcaaatttcttatttatttgtgacatcaaattttcaaaataatttttttaattatcggttgatccggtcagtcgataaaaacataaactttcagcgaccgttaaaactttcctactaccgatttagagaaaatcttagcttgaaacgtaattgtaacctgccttcatgcaagtcgcaagatatgtcatcctaagttgtatatgttttctcaaaagatgtatttacttgagaaaatacgtttcaacgttgatggacaaccaattaagaatcaagcacctttcgtaatcaatttaggcttatcgtctaaggtatactgatttacgacagttgactagacttataaggaacaaaataatagaatagtttctaaacacttcacctaatcatagagactaagatggtaattcgtaaacgacaaagcctagtgacactgtccattgtaaaattccacatcatattagtattaaacatatacatgtagtttcctgaacacatgtagtatcaaacacacttcgtggcttcttcctcgaaacctgcggccgctcattaattaagtcatctagttgaaggatcgctatcaactttgtatagaaaagttgggccgaattcgagctcggtacggccagaatggcccggaccgaagcttaccggtcgttgagaacaaatctggaaggccatccttgccttctgtcgtcgggcgcaccggacagtccggtgcacaccggacactgtccggtgcccgatttccttccttaaacatcgcagccgaccgttgccaaccgttgcagatctggcgcaccggacagtccggtgcacaccggacagtccggtgccactttccgaccgttggccagaccacgtgtcgcgcgcagatttcgcggccgaccgttggctcgggccgaccgttggctcaccggaaagtccggtgcacaccggacagtccggtgaattttagccgtacgccgtcggcaaattcccgagagcagcgtcttcaggtcgaggcagcctggcgcaccggacactgtccggtgcaccaccggagagtccggtgccccagaccgaagcagtcttttggctgtacacagccaactcttcttctttcttcttctctctgtttctattacttagacaagtatattagtacacaaaaccaatgtactaaggcttagaaacatacctttacttgtgatttgcactttgttcatccatgggcatagatttacatttaagcacttgtgttgacactcaatcaccaaaatacttagaaatggcccaaaggcacatttccctttcagtctttcatcgaacatcatggtcacgttcttcataccataaaaactagcattcccataaacatttgtctccacgcttcctccatggtatagtgtcactagggtgtccatctattgcaaacatggattactaactcaataatggctaaatactagtgcctcaatacttactaagtagtaaataaataataactgcttactatatagtaaatattaaatgaccacattaaccgaaattacataatctatgaataatgtacgaaaacaatgtatacatgagatcgcgtacgagtccagctaacggtggagaaggtcaagtcggaaggacacctatatacaaaaaatactattgtcaataaaaaatcggcagcacctcccctataaagtgatgtttctaaaacctacaaagaaataacaacacgatggttgccaacacagaaaactgctaccaacaagtatatgttaaaccctatataatcactcactttcctccatccattacactaacaatatgctaccgacttactaactatataatcactaactatatacacgaacaaataaatacctagctaactatttataataacaaatgaatagctaacagactatacattaaaccaagtaatcttgtgctacaaatttatttttcagacagaaaaatctatttagctaactaattaatacaaattaataccaagcaacgatagatgaacatctagttgtctaattagctaactaattaatacaaattaagtagaatccttaccgtggggagatggggcgcgacgaagtgctcgagcttggggcgcggcgaccggcgacgtgaagcttgggggcgcgggggccggacggcgctgcgggcggcatggcgggcggctgcgggcggcggcgcgggcgcaggaaacaaacgacgggagtgggaggaaggagaaagcggcgcgccggtttagtcctagctcggcgccaagatctgtggcgccgagctaggtgccacgatggccgccgcgtcagcaaagctcggcgccaaggcatgttgcgccgagccgtgttagctcggcgtcatagctcatggtgccgagttttgggtctaaaattgcgtttaagtattctagggatctaaacgcaaatatttttcgaaaatagggccgaaaaacaaaaaaaaatcggtcgtttcgtcgagcacatcgtccagcctatcttgcatgtccatcctctctatggttcgcgagccgcgcgcatggcgctccaaaggaggggcgaggttgaatatagacagatggaatgggtggttctctatttatagcgcatgcagtcgtcccctggcacacctatttatatgtgagcgttcctggcactagagagatcgatcgatcgagcttaattgcgccactgctcgttatcctcctcttgcattgcattgcaggtcgtagttgagcagcagcaaccactgcacaggcctaggcgcgccatttaaatatggatcaccaccgcacgccgatggagaactcggcgtcctcgaagccgccgacgccggcgtccacgcccaactcgcgcctcgcatcggcgccgtcaccccgccactccgccacgccgccgcacgcgtccgcgccggcgtccgccccggcgccggcctcgcgcaccgtctacagcgaccgcttcatccccagccgcgccggatccaacctcgcgctcttcgacctcggcccctcgccctcgcccgccgccgccgccgcctcctcgtcctcctcccacgaggccggccccgcggcctcgtccggatctgcgcccgccgcggcgtcgccctactgcgcgctcctccgcgccgcgctcttcgggcccgacacgcccgaccgggtcgcgtcctcggccgccgcgtgctcgtcctcctcctcctccccggggctctcgcctgtgggcacccccgccaccgggaacatcttcagattcaagacggaggtgcgccggaacgccaagagggcgcttttttccggaggggaggaggaggaggacgccctgttccccggcattttcaccaccaggggcgcgggaccaaggaaggtcccgaggtcgccctacaaggtgctggatgcgcctgcgttgcaggacgacttctacctcaacctcgtcgattggtcttcacataacgtcctcgctgttgggttgggcaattgcgtttacctgtggaatgcatgcagcagcaaggtcaccaagctttgcgatttgggggtggatgacaacgtttgttctgtggggtgggcgcagcgcggcactcaccttgcagtaggaacaaatcaaggaaaagttcagatctgggatgcaactcgctgtaaaagaataaggacaatggaaagccatcgcatgcgtgtaggtgctcttgcatggagttcttcgttgctttcttctggaagccgtgacaagagcatcctccaccatgatatccgtgctcaagaagatcatgttagcaagcttaccgggcataaatctgaggtttgtggactcaagtggtcttatgacaatcgtcagcttgcatcgggtggcaatgacaacagactttttgtttggaatccacattcagtacagccagtactgaagtatactgagcacacagcagctgtcaaagctattgcctggtcacctcatctccatgggctgcttgcatctggtggaggaactgcagatagatgcatacgattttggaatacgaccacaaatgcacacttgagctgtgtggacactggcagccaggtctgcaatctcgcgtggtcaaagaatgtaaatgagcttgttagcacccacggctactctcagaaccaaataattgtttggagatatccaacaatgtcgaagcttgccactttgacagggcatacatacagagtattgtacttagctatttcccctgatggccagaccatagttactggtgctggtgatgaaacgctccggttttggaacgtgttcccctctccaaagtcccagagttctgatagtttaagttgtgtcggaggaacatctttcgttagaagctacatccggtgaatttaaatgcccgggcgatcgctcgaggcgtacctagtggtaccacatggttaacctagacttgtccatcttctggattggccaacttaattaatgtatgaaataaaaggatgcacacatagtgacatgctaatcactataatgtgggcatcaaagttgtgtgttatgtgtaattactagttatctgaataaaagagaaagagatcatccatatttcttatcctaaatgaatgtcacgtgtctttataattctttgatgaaccagatgcatttcattaaccaaatccatatacatataaatattaatcatatataattaatatcaattgggttagcaaaacaaatctagtctaggtgtgttttgcgaatgcggccgccaccgcggtggagctcgaattccggtccgggcctagaaggccagcttcaagtttgtacaaaaaagcaggctccggccagaatggcccggaccgggttaccgaattcgagctcggtaccctgggatccgatatcgatgggccctggccgaagcttggtcacccggtccgggcctagaaggccgatctcccgggcacccagctttcttgtacaaagtggccgttaacggatcggccagaatggcccggaccgaagcttgcatgcctgcagtgcagcgtgacccggtcgtgcccctctctagagataatgagcattgcatgtctaagttataaaaaattaccacatattttttttgtcacacttgtttgaagtgcagtttatctatctttatacatatatttaaactttactctacgaataatataatctatagtactacaataatatcagtgttttagagaatcatataaatgaacagttagacatggtctaaaggacaattgagtattttgacaacaggactctacagttttatctttttagtgtgcatgtgttctcctttttttttgcaaatagcttcacctatataatacttcatccattttattagtacatccatttagggtttagggttaatggtttttatagactaatttttttagtacatctattttattctattttagcctctaaattaagaaaactaaaactctattttagtttttttatttaataatttagatataaaatagaataaaataaagtgactaaaaattaaacaaataccctttaagaaattaaaaaaactaaggaaacatttttcttgtttcgagtagataatgccagcctgttaaacgccgtcgacgagtctaacggacaccaaccagcgaaccagcagcgtcgcgtcgggccaagcgaagcagacggcacggcatctctgtcgctgcctctggacccctctcgagagttccgctccaccgttggacttgctccgctgtcggcatccagaaattgcgtggcggagcggcagacgtgagccggcacggcaggcggcctcctcctcctctcacggcaccggcagctacgggggattcctttcccaccgctccttcgctttcccttcctcgcccgccgtaataaatagacaccccctccacaccctctttccccaacctcgtgttgttcggagcgcacacacacacaaccagatctcccccaaatccacccgtcggcacctccgcttcaaggtacgccgctcgtcctcccccccccccctctctaccttctctagatcggcgttccggtccatgcatggttagggcccggtagttctacttctgttcatgtttgtgttagatccgtgtttgtgttagatccgtgctgctagcgttcgtacacggatgcgacctgtacgtcagacacgttctgattgctaacttgccagtgtttctctttggggaatcctgggatggctctagccgttccgcagacgggatcgatttcatgattttttttgtttcgttgcatagggtttggtttgcccttttcctttatttcaatatatgccgtgcacttgtttgtcgggtcatcttttcatgcttttttttgtcttggttgtgatgatgtggtctggttgggcggtcgttctagatcggagtagaattctgtttcaaactacctggtggatttattaattttggatctgtatgtgtgtgccatacatattcatagttacgaattgaagatgatggatggaaatatcgatctaggataggtatacatgttgatgcgggttttactgatgcatatacagagatgctttttgttcgcttggttgtgatgatgtggtgtggttgggcggtcgttcattcgttctagatcggagtagaatactgtttcaaactacctggtgtatttattaattttggaactgtatgtgtgtgtcatacatcttcatagttacgagtttaagatggatggaaatatcgatctaggataggtatacatgttgatgtgggttttactgatgcatatacatgatggcatatgcagcatctattcatatgctctaaccttgagtacctatctattataataaacaagtatgttttataattattttgatcttgatatacttggatgatggcatatgcagcagctatatgtggatttttttagccctgccttcatacgctatttatttgcttggtactgtttcttttgtcgatgctcaccctgttgtttggtgttacttctgcaggtcgactttaacttagcctaggatccatggcctcctccgagaacgtcatcaccgagttcatgcgcttcaaggtgcgcatggagggcaccgtgaacggccacgagttcgagatcgagggcgagggcgagggccgcccctacgagggccacaacaccgtgaagctgaaggtgaccaagggcggccccctgcccttcgcctgggacatcctgtccccccagttccagtacggctccaaggtgtacgtgaagcaccccgccgacatccccgactacaagaagctgtccttccccgagggcttcaagtgggagcgcgtgatgaacttcgaggacggcggcgtggcgaccgtgacccaggactcctccctgcaggacggctgcttcatctacaaggtgaagttcatcggcgtgaacttcccctccgacggccccgtgatgcagaagaagaccatgggctgggaggcctccaccgagcgcctgtacccccgcgacggcgtgctgaagggcgagacccacaaggccctgaagctgaaggacggcggccactacctggtggagttcaagtccatctacatggccaagaagcccgtgcagctgcccggctactactacgtggacgccaagctggacatcacctcccacaacgaggactacaccatcgtggagcagtacgagcgcaccgagggccgccaccacctgttcctgtagggtaccacatggttaacctagacttgtccatcttctggattggccaacttaattaatgtatgaaataaaaggatgcacacatagtgacatgctaatcactataatgtgggcatcaaagttgtgtgttatgtgtaattactagttatctgaataaaagagaaagagatcatccatatttcttatcctaaatgaatgtcacgtgtctttataattctttgatgaaccagatgcatttcattaaccaaatccatatacatataaatattaatcatatataattaatatcaattgggttagcaaaacaaatctagtctaggtgtgttttgcgaatgcggccgccaccgcggtggagctcgaattccggtccgggcctagaaggccagcttcggccgccccgggcaactttattatacaaagttgatagatcctcatgtcttcatcgtaagcttaaacaggccagaatggcctctggattcagcggcctagaaggccgaagtacttggtcttcctagtcgagtagatcacattcaagcttggtcacccggtccgtcaatattctgattccgatgacttcgtaggttcctagctcaagccgctcgtgtccaagcgtcacttacgattagctaatgattacggcatctaggaccgactagtggcgcgccgactagctagctaaggtaccgagctcgaattcattccgattaatcgtggcctcttgctcttcaggatgaagagctatgtttaaacgtgcaagcgctactagacaattcagtacattaaaaacgtccgcaatgtgttattaagttgtctaagcgtcaatttgtttacaccacaatatatcctgcca

SEQ ID NO: 38 - DNA, 28385 bp, Artificial Sequence
  RX000009
gtttacccgccaatatatcctgtcaaacactgatagtttaaactgaaggcgggaaacgacaatctgatcatgagcggagaattaagggagtcacgttatgacccccgccgatgacgcgggacaagccgttttacgtttggaactgacagaaccgcaacgttgaaggagccactcagcaagctggtacgattgtaatacgactcactatagggcgaattgagcgctgtttaaacgctcttcaactggaagagcggttacgctgtttaaacgctcttcaactggaagagcggttactaccggttcactagctagctgctaatcgagctagttaccctatgaggtgacatgaagcgctcacggttactatgacggttagcttcacgactgttggtggcagtagcgtacgacttagctatagttccggacttacccttaagcgatttaaatctgcggttaccgaattcgagctcggtaccctgggatctgcccttactttaacgcctctaaccaacacccctttatctttataaggaacaataaacagaatttgccccactgttctaaatcacctaataatatccccagctaaaaacaataaaggtttcctagaattaagacaagcatgactgttcctccaggagggtttggaacattgttgcagtcttgcagatacgggcgaagggtgagaaacagagcggagggctggaggtgacctcggtagtcgacgccggagttgagcttgacaacgacggggcggcccctgatggacttgaggaagtccgatggcgtcttcaccgtcccgccggcgcccgaggcgggcctgtcgctgccgccgccgccgctgctcatcttgcgcgctgtgcccccggcggtgtccctgtgttgcggatcgcgggtgggccaggtggatgcgagggcgacccgtttggactccggccggagccgccggatccctggtcggtgtcagtgccgtttactctgggccccacgtgtcagtaccgtctgtagatgacaacaacccgtcgtccacagtcatgtccaaaatatcctttcttcttttttttcgattcggatatctatcttccttttttttttccaaaaatcttcttgacgcaccagcgcgcacgtttgtggtaaacgccgacacgtcggtcccacgtcgatagaccccacccaccagtgagtagcgtgtacgtattcgggggtgacggacgtgtcgccgtcgtcttgctagtcccattcccatctgagccacacatctctgaacaaaaaaaaggagggaggcctccacgcacatccccctccgtgccacccgccccaaaccctcgcgccgcctccgagacagccgccgcaaccatggccaccgccgccgccgcgtctaccgcgctcactggcgccactaccgctgcgcccaaggcgaggcgccgggcgcacctcctggccacccgccgcgccctcgccgcgcccatcaggtgctcagcggcgtcacccgccatgccgatggctcccccggccaccccgctccggccgtggggccccaccgagccccgcaagggtgctgacatcctcgtcgagtccctcgagcgctgcggcgtccgcgacgtaagtttctgcttctacctttgatatatatataataattatcattaattagtagtaatataatatttcaaatatttttttcaaaataaaagaatgtagtatatagcaattgcttttctgtagtttataacttcgtatagcatacattatacgaagttatacttttctaatatatgaccaaaatttgttaccgaattcaggcgacccatcgctgctttgtctacatcatgttcttcatcatcctccccaggcgacgcgtgctgctgttcttattcagactaccgttcgagtgactgcatggcgtacatctttctgcatcgactttgtacggctacatcgaacatatacacgagatgtctcgtgtgaatagagtcactaatgccttaagcatcggttactccgtagggtacattctgttcttcttatttgtgcatatttttattgttgtttactgattatacgagtagttatacatacatgcacatacatatcatcacatatatcacaatatttttctaaattaaattaaaactaaaaatgactaaatttctaacaccaacgacattgtaatgttttctccaacaactttacctattctacattgttctatttcgaatttcactctataaacaacatagtctacaatggaaaacagtgctttgtacgactatatacgcgatgtgtggctacaacataagacaatatagtcgtttgaagattgaacctatatatcggtacggttaatccgtctatgtacgtgggcatgacgaacacccgtgataacgaaggattaacgtgcacaatcataaatccaaagtaggagcggtgcatgatgagaatcgctctcagtactcgacataatgaaccttacgaggtacaacaggcaggcaggcagggaccaggggccgcctttatttcaggctcgctggccccacgggcgtgctgcgtgcacgaagggcactaccccaacctctcaccgaaaaccgcgctggatcggcaaatcaaacgaggtggtgccccgtgcccactctccacgtccacggcaccatccctctgcagccgctcaccagccatgccgtgtcgcggaacggcacaaccacccccaacccactcacgaaaccccgtcccggccgtgcccgtgtcggtccgcgctcggcaacgaggcggcccgcgctgctgagtcccctggacacccgacaccctgtcggccctttgtttattcatcccgaaatctcatctgcccccacggccgactgcgctgcgccgcccggatatatatacccatcgttatcgatcgactggggactctatcagtgatagagtctagaggatcgctcaggaaggccgctgagatagaggcatggcggccaatgcgggcggcggtggagcgggaggaggcagcggcagcggcagcgtggctgcgccggcggtgtgccgccccagcggctcgcggtggacgccgacgccggagcagatcaggatgctgaaggagctctactacggctgcggcatccggtcgcccagctcggagcagatccagcgcatcaccgccatgctgcggcagcacggcaagatcgagggcaagaacgtcttctactggttccagaaccacaaggcccgcgagcgccagaagcgccgcctcaccagcctcgacgtcaacgtgcccgccgccggcgcggccgacgccaccaccagccaactcggcgtcctctcgctgtcgtcgccgccgccttcaggcgcggcgcctccctcgcccaccctcggcttctacgccgccggcaatggcggcggatcggctgtgctgctggacacgagttccgactggggcagcagcggcgctgccatggccaccgagacatgcttcctgcaggactacatgggcgtgacggacacgggcagctcgtcgcagtggccacgcttctcgtcgtcggacacgataatggcggcggccgcggcgcgggcggcgacgacgcgggcgcccgagacgctccctctcttcccgacctgcggcgacgacggcggcagcggtagcagcagctacttgccgttctggggtgccgcgtccacaactgccggcgccacttcttccgttgcgatccagcagcaacaccagctgcaggagcagtacagcttttacagcaacagcaacagcacccagctggccggcaccggcaaccaagacgtatcggcaacagcagcagcagccgccgccctggagctgagcctcagctcatggtgctccccttaccctgctgcagggagtatgtgagagcaacgcgagctgccactgctcttcactggtaccgttaacagatcattcgacaaagcagcattagtccgttgatcggtggaagaccactcgtcagtgttgagttgaatgtttgatcaataaaatacggcaatgctgtaagggttgttttttatgccattgataatacactgtactgttcagttgttgaactctatttcttagccatgccaagtgcttttcttattttgaataacattacagcaaaaagttgaaagacaaaaaaaaaaacccccgaacagagtgctttgggtcccaagcttctttagactgtgttcggcgttccccctaaatttctccccctatatctcactcacttgtcacatcagcgttctctttccccctatatctccacgctctacagcagttccacctatatcaaacctctataccccaccacaacaatattatatactttcatcttcaactaactcatgtaccttccaatttttttctactaataattatttacgtgcacagaaacttagcaaggagagagagagcggggtgacccaccttgctagttggatattacctcttctcttcaaagtatccttgaacgctcaccggttatcaaatctctacactatagctctgtagtcttgctagatagttagttctttagctctcggtgaccaagcttggcgcgatcaagcttatcgataccgtcgacctcgaagcttggtcacccggtccgggcctagaaggccagcttcaagtttgtacaaaaaagcaggctccggccagaatggcccggaccgggttaccgaattcttaccctagctccctgcggctgttacgcggtcccccatcaatcttctgttcttgcggttgtagcctgtgtaacagtgctagagtatgtatgataaataggttttaagtctgcttacatgacattttttattgtggaagagacatataaaaattagagagagtggttctcatgcaacggcggacggcccggtgctaaaagagcttcaagacaaaataatgaaacaggaagagagtagatttatctaagagccaactttattatatgaatgtgtttattgttggctttagatgatatggtaaggagttagagctaataatagataggctctattattattattattaattaaactcgctctaaggaggaaagtgggaggaagggacgaggacgaagactactggaagcatcgtgcatggatgatggatgtggtgtctcttaatgtaggtggccggaggatgtacgtgttaattgcgcgataagcactcagatccaaccgcaaactacctccacactgacacactgatagagagaaagagagacctccgacgactgccgccgcagatgagccacgtacgtatacgacgtctgccggccggctcaggctgccgccatcaccctgctcgaaagtcgcgttaggcggcgccagctacataggagtatctagtctagccagttagtatactactactgcgctgatgatgaattaactctgcatagatactgtacttgcctccctccaacacccaaccacctcctgctcggctcttaataacttggacacggatcgatgccatccaaggaagaacacgacgacgacgacggaacatccaccatgcaagcttgcatccatacgccgatacgcgtgcatccatccatccaccattatttccattttccaccgatcacacgtacacaggcctatttaaggagcgacatcccactgcaactctcctcaccactcatcaccagctagctctagcaaagcacttgccatctaccgaccgccgcattccaaacagcccgacgagctagcagagcggcaggcacctccctcctcaaggaacccatggccactgtgaacaactggctcgctttctccctctccccgcaggagctgccgccctcccagacgacggactccacactcatctcggccgccaccgccgaccatgtctccggcgatgtctgcttcaacatcccccaagattggagcatgaggggatcagagctttcggcgctcgtcgcggagccgaagctggaggacttcctcggcggcatctccttctccgagcagcatcacaaggccaactgcaacatgatacccagcactagcagcacagtttgctacgcgagctcaggtgctagcaccggctaccatcaccagctgtaccaccagcccaccagctcagcgctccacttcgcggactccgtaatggtggcttcctcggccggtgtccacgacggcggtgccatgctcagcgcggccgccgctaacggtgtcgctggcgctgccagtgccaacggcggcggcatcgggctgtccatgattaagaactggctgcggagccaaccggcgcccatgcagccgagggtggcggcggctgagggcgcgcaggggctctctttgtccatgaacatggcggggacgacccaaggcgctgctggcatgccacttctcgctggagagcgcgcacgggcgcccgagagtgtatcgacgtcagcacagggtggagccgtcgtcgtcacggcgccgaaggaggatagcggtggcagcggtgttgccggcgctctagtagccgtgagcacggacacgggtggcagcggcggcgcgtcggctgacaacacggcaaggaagacggtggacacgttcgggcagcgcacgtcgatttaccgtggcgtgacaaggcatagatggactgggagatatgaggcacatctttgggataacagttgcagaagggaagggcaaactcgtaagggtcgtcaagtctatttaggtggctatgataaagaggagaaagctgctagggcttatgatcttgctgctctgaagtactggggtgccacaacaacaacaaattttccagtgagtaactacgaaaaggagctcgaggacatgaagcacatgacaaggcaggagtttgtagcgtctctgagaaggaagagcagtggtttctccagaggtgcatccatttacaggggagtgactaggcatcaccaacatggaagatggcaagcacggattggacgagttgcagggaacaaggatctttacttgggcaccttcagcacccaggaggaggcagcggaggcgtacgacatcgcggcgatcaagttccgcggcctcaacgccgtcaccaacttcgacatgagccgctacgacgtgaagagcatcctggacagcagcgccctccccatcggcagcgccgccaagcgcctcaaggaggccgaggccgcagcgtccgcgcagcaccaccacgccggcgtggtgagctacgacgtcggccgcatcgcctcgcagctcggcgacggcggagccctggcggcggcgtacggcgcgcactaccacggcgccgcctggccgaccatcgcgttccagccgggcgccgccagcacaggcctgtaccacccgtacgcgcagcagccaatgcgcggcggcgggtggtgcaagcaggagcaggaccacgcggtgatcgcggccgcgcacagcctgcaggacctccaccacctgaacctgggcgcggccggcgcgcacgactttttctcggcagggcagcaggccgccgccgctgcgatgcacggcctgggtagcatcgacagtgcgtcgctcgagcacagcaccggctccaactccgtcgtctacaacggcggggtcggcgacagcaacggcgccagcgccgtcggcggcagtggcggtggctacatgatgccgatgagcgctgccggagcaaccactacatcggcaatggtgagccacgagcaggtgcatgcacgggcctacgacgaagccaagcaggctgctcagatggggtacgagagctacctggtgaacgcggagaacaatggtggcggaaggatgtctgcatgggggactgtcgtgtctgcagccgcggcggcagcagcaagcagcaacgacaacatggccgccgacgtcgggcatggcggcgcgcagctcttcagtgtctggaacgacacttaagcgtacctagtggtacctgacatcttatagtctgcaacctctcgtgtctgaattcctatctttatcaagtgttattgcttccacgactataggacagctttcgtcgaaagcttttgctcatgtgatctcgaaggattcatctagtctgatttttcgtgacttgtatcggttttattggattcatccaacatatatcaataaaaaatgagttgtgtttcctttcttcctagttcagttaaaattatttccctcctgcgcttgtgctgtaattgtctgtgtacctgttgtttgtgactgtgttagttcccttggatatgatttcgtatttgatatgtacatggagatagcttagcttcattattggagtatgaagttagtatgacatagtcactctcctggaaaattgacactgcaaaccatatttttattctgaaccacaaatcctagtcagtccgctggcatatgccgtccgtttgctgaatccagaacgtgggtttggagatgtacggctgagatgcctctatgcgaaggggatttcgtggtgaaacgagatgggagtagagcaacgcccgtggaagatgcttcaaacttccacacttttgagcaacgatcggcagtagtaaggtagacgatttcaagatcaaagcatatgaagataaacaacatcaacaacaaaatttgttggggttctatagagagaaacagagctacatacatacactgttttgtatctaccatctgagatgatgaaaagatgaaaaactaaagaatgccccggcgccaacgccaggacacgccgcgcgcgcgtcacccgagccatctcttgacccagccggcgctgtatatttacacacgttgcagcatcgatcaccacctgttcgatcgcgtcgccgtcaccgggatctgagtcgaaacctagacttgtccatcttctggattggccaacttaattaatgtatgaaataaaaggatgcacacatagtgacatgctaatcactataatgtgggcatcaaagttgtgtgttatgtgtaattactagttatctgaataaaagagaaagagatcatccatatttcttatcctaaatgaatgtcacgtgtctttataattctttgatgaaccagatgcatttcattaaccaaatccatatacatataaatattaatcatatataattaatatcaattgggttagcaaaacaaatctagtctaggtgtgttttgcgaatgcgaccttcttatgtgcttctagtctccaaatgtggttgatagttattttgctctaagatcaacagtaatgaagtataaatcatcgttgtggtgtgctactcggttaattgagcattaacacacacaaacatgacgaggatggtataatctccaaaaatgtgtactttgttaggtgggaccctatagccttgattaatgtgctatgttaggcatgcctggaaacgtgtgacgcatatgttttgtgaacctgttgatattatatgtgcttttatattaccatattttattaaaatactaatatttattactagtaagatataacattctatctagcttaaaaactaaccataaatattccataataactagatttaccaaactaatatactaaatatacataataaatacaaaattaacaagacaataatcaatatttatgagcttaatatatttagacattatggttggtcgacgataatcatgctaacttttcgtaattgcttgattgaaatatgcttagaataatgcctctttgttctacatggcaaatagggaccattatggtgtaacaccctgggaaccacaaacaccccgaaatgctactaaactacacaactaaccttcatatataaaatttcgacagcatctcctttgaaaatttgcatagacgtggaagcaacagagtataaacagatatcatgataagaaaacatactagacattaataatctgctagaaatgggaagaatcctaacttgacgactgcgtaactgactagagtcacacttagctgaccctagtcacttacaactgacttcgtgtcctagatcgatgggccctggccgaagcttggtcacccggtccgggcctagaaggccagcttcaagtttgtaccctggagcttgccgagtgccatccttggacactcgataaagtatattttattttttttattttgccaaccaaactttttgtggtatgttcctacactatgtagatctacatgtaccattttggcacaattacatatttacaaaaatgttttctataaatattagatttagttcgtttatttgaatttcttcggaaaattcacatttaaactgcaagtcactcgaaacatggaaaaccgtgcatgcaaaataaatgatatgcatgttatctagcacaagttacgaccgatttcagaagcagaccagaatcttcaagcaccatgctcactaaacatgaccgtgaacttgttatctagttgtttaaaaattgtataaaacacaaataaagtcagaaattaatgaaacttgtccacatgtcatgatatcatatatagaggttgtgataaaaatttgataatgtttcggtaaagttgtgacgtactatgtgtagaaacctaagtgacctacacataaaatcatagagtttcaatgtagttcactcgacaaagactttgtcaagtgtccgataaaaagtactcgacaaagaagccgttgtcgatgtactgttcgtcgagatctctttgtcgagtgtcacactaggcaaagtctttacggagtgtttttcaggctttgacactcggcaaagcgctcgattccagtagtgacagtaatttgcatcaaaaatagctgagagatttaggccccgtttcaatctcacgggataaagtttagcttcctgctaaactttagctatatgaattgaagtgctaaagtttagtttcaattaccaccattagctctcctgtttagattacaaatggctaaaagtagctaaaaaatagctgctaaagtttatctcgcgagattgaaacagggccttaaaatgagtcaactaatagaccaactaattattagctattagtcgttagcttctttaatctaagctaaaaccaactaatagcttatttgttgaattacaattagctcaacggaattctctgtttttctaaaaaaaaactgcccctctcttacagcaaattgtccgctgcccgtcgtccagatacaatgaacgtacctagtaggaactcttttacacgctcggtcgctcgccgcggatcggagtccccggaacacgacaccactgtggaacacgacaaagtctgctcagaggcggccacaccctggcgtgcaccgagccggagcccggataagcacggtaaggagagtacggcgggacgtggcgacccgtgtgtctgctgccacgcagccttcctccacgtagccgcgcggccgcgccacgtaccagggcccggcgctggtataaatgcgcgccacctccgctttagttctgcatacagccaacccaaggatgtccaacctgctcacggttcaccagaaccttccggctcttccagtggacgcgacgtccgatgaagtcaggaagaacctcatggacatgttccgcgacaggcaagcgttcagcgagcacacctggaagatgctgctctccgtctgccgctcctgggctgcatggtgcaagctgaacaacaggaagtggttccccgctgagcccgaggacgtgagggattaccttctgtacctgcaagcgcgaggtttgtttctgcttctacctttgatatatatataataattatcattaattagtagtaatataatatttcaaatatttttttcaaaataaaagaatgtagtatatagcaattgcttttctgtagtttataagtgtgtatattttaatttataacttttctaatatatgaccaaaacatggtgatgcctaggtctggcagtgaagaccatccagcaacaccttggacaactgaacatgcttcacaggcgctccggcctcccgcgccccagcgactcgaacgccgtgagcctcgtcatgcgccgcatcaggaaggaaaacgtcgatgccggcgaaagggcaaagcaggccctcgcgttcgagaggaccgatttcgaccaggtccgcagcctgatggagaacagcgacaggtgccaggacattaggaacctggcgttcctcggaattgcatacaacacgctcctcaggatcgcggaaattgcccgcattcgcgtgaaggacattagccgcaccgacggcggcaggatgcttatccacattggcaggaccaagacgctcgtttccaccgcaggcgtcgaaaaggccctcagcctcggagtgaccaagctcgtcgaacgctggatctccgtgtccggcgtcgcggacgacccaaacaactacctcttctgccgcgtccgcaagaacggggtggctgcccctagcgccaccagccaactcagcacgagggccttggaaggtattttcgaggccacccaccgcctgatctacggcgcgaaggatgacagcggtcaacgctacctcgcatggtccgggcactccgcccgcgttggagctgctagggacatggcccgcgccggtgtttccatccccgaaatcatgcaggcgggtggatggacgaacgtgaacattgtcatgaactacattcgcaaccttgacagcgagacgggcgcaatggttcgcctcctggaagatggtgactgagctagacccagctttcttgtacaaagtggccgttaacggatccagacttgtccatcttctggattggccaacttaattaatgtatgaaataaaaggatgcacacatagtgacatgctaatcactataatgtgggcatcaaagttgtgtgttatgtgtaattactagttatctgaataaaagagaaagagatcatccatatttcttatcctaaatgaatgtcacgtgtctttataattctttgatgaaccagatgcatttcattaaccaaatccatatacatataaatattaatcatatataattaatatcaattgggttagcaaaacaaatctagtctaggtgtgttttgcgaattgcggcaagctgttaccgaattcctgcccttaaggccaattgttcaagattcattcaacaattgaaacatctcccatgattaaatcagtataaggttgctatggtcttgcttgacaaagtttttttttgagggaatttcaactaaatttttgagtgaaactatcaaatactgattttaaaaaatttttataaaaggaagcgcagagataaaaggccatctatgctacaaaagtacccaaaaatgtaatcctaaagtatgaattgcattttttttttgtttggacgaaaggaaaggagtattaccacaagaatgatatcatcttcatatttagatcttttttgggtaaagcttgagattctctaaatatagagaaatcagaagaaaaaaaaaccgtgttttggtggttttgatttctagcctccacaataactttgacggcgtcgacaagtctaacggacaccaagcagcgaaccaccagcgccgagccaagcgaagcagacggccgagacgttgacaccttcggcgcggcatctctcgagagttccgctccggcgctccacctccaccgctggcggtttcttattccgttccgttccgcctcctgctctgctcctctccacaccacacggcacgaaaccgttacggcaccggcagcacccagcacgggagaggggattcctttcccaccgttccttccctttccgccccgccgctataaatagccagccccatccccagcttttttccccaatctcatctcctctctcctgttgttcggagcacacgcacaatccgatcgatccccaaatccccttcgtctctcctcgcgagcctcgtggatcccagcttcaaggtacggcgatcgatcatcccccctccttctctctaccttcttttctctagactacatcggatggcgatccatggttagggcctgctagtttcccttcctgttttgtcgatggctgcgaggcacaatagatctgatggcgttatgacggctaacttgtcatgttgttgcgatttatagtccctttaggagatcagtttaatttctcggatggttcgagatcggtggtccatggttagtaccctaagatccgcgctgttagggttcgtagatggaggcgacctgttctgattgttaacttgtcagtacctgggaaatcctgggatggttctagctcgtccgcagatgagatcgatttcatgatcctctgtatcttgtttcgttgcctaggttccgtctaatctatccgtggtatgatgtagatgttttgatcgtgctaactacgtcttgtaaagttaattgtcaggtcataatttttagcatgcctttttttttgtttggttttgtctaattgggctgtcgttctagatcagagtagaagactgttccaaactacctgctggatttattgaacttggatctgtatgtgtgtcacatatcttcataaattcatgattaagatggattgaaatatcttttatctttttggtatggatagttctatatgttggtgtggctttgttagatgtatacatgcttagatacatgaagcaacgtgctgctactgtttagtaattgctgttcatttgtctaataaacagataaggatatgtatttatgttgctgttggttttgctggtactttgttggatacaaatgcttcaatacagaaaacagcatgctgctacgatttaccatttatctaatcttatcatatgtctaatctaataaacaaacatgcttttaaattatcttcatatgcttggatgatggcatacacagcggctatgtgtggttttttaaatacccagcatcatgggcatgcatgacactgctttaatatgctttttatttgcttgagactgtttcttttgtttatactgaccctttagttcggtgactcttctgcaggtcgactttaacttagcctaggatccatggcccagtccaagcacggcctgaccaaggagatgaccatgaagtaccgcatggagggctgcgtggacggccacaagttcgtgatcaccggcgagggcatcggctaccccttcaagggcaagcaggccatcaacctgtgcgtggtggagggcggccccttgcccttcgccgaggacatcttgtccgccgccttcatgtacggcaaccgcgtgttcaccgagtacccccaggacatcgtcgactacttcaagaactcctgccccgccggctacacctgggaccgctccttcctgttcgaggacggcgccgtgtgcatctgcaacgccgacatcaccgtgagcgtggaggagaactgcatgtaccacgagtccaagttctacggcgtgaacttccccgccgacggccccgtgatgaagaagatgaccgacaactgggagccctcctgcgagaagatcatccccgtgcccaagcagggcatcttgaagggcgacgtgagcatgtacctgctgctgaaggacggtggccgcttgcgctgccagttcgacaccgtgtacaaggccaagtccgtgccccgcaagatgcccgactggcacttcatccagcacaagctgacccgcgaggaccgcagcgacgccaagaaccagaagtggcacctgaccgagcacgccatcgcctccggctccgccttgccctccggactcagatctcgatagggtaccaatggccagttaacagatccagctgctgctgttctagggttcacaagtctgcctatttgtcttccccaatggagctatggttgtctggtctggtccttggtcgtgtcccgtttcattgtgtactatttacctgtaatgtgtatccttaagtctggtttgatggtgtctgaaacgttttgctgtggtagagcagcatggaagaactataatgaataagtgatccctaatcattgtgtccaaattttgcttctgctatacccttttgtgctgtttcttatgttttgcttaaaaatttgatctgacaaacaaatttgtctaaattatgctcttgttctgactgtgtactgtacacatttgtattgctaccggtttggcacatagttttctctttgattgcagatcaaacccttctgattgcagattgcttggctatggctgatgtgctcactgttcttctttagcttgtatattgctgatggtggcttggctacggctgaaaaagttgctgctgcgccgacttggcaactgttgctccagtaatgctttgtcctctcttcctagccgccgacttggcacttggcagctgttgctcctgtaatgcgttgttatctcttatctcttgagatgtactatgattttgaggctgtttgacttgtgccagattgccagtgctgatgctatattatctcaggtttttatgctagtatatgttttactgtgtgctgcctgtgtcgagttacgtaatctattgaaccgctatgcgtgttgatgccctgttgttgcttgccagattgatgcccctgttgcttgcagcttgcaagctgtagtgaaatcctaaaattcgaaaccaaatctattctgaacttttgaagatctgtgatgtccggaagaaaagattcaaacagataaacgggactctccagaatctataaaataaatgatcgacaaacgctttgctttggtaggcttcctagttagttagcggaccgaagcttcggtccgggcctagaaggccagcttcggccgccccatttcaaatatttttttcaaaataaaagaatgtagtatatagcaattgcttttctgtagtttataacttcgtatagcatacattatacgaagttatacttttctaatatatgaccaaaatttgttgatgtgcaggtcttcgcctaccccggcggcgcgtccatggagatccaccaggcactcacccgctcccccgtcatcgccaaccacctcttccgccacgagcaaggggaggcctttgccgcctccggctacgcgcgctcctcgggccgcgtcggcgtctgcatcgccacctccggccccggcgccaccaacctagtctccgcgctcgccgacgcgctgctcgattccgtccccatggtcgccatcacgggacaggtggcgcgacgcatgattggcaccgacgccttccaggagacgcccatcgtcgaggtcacccgctccatcaccaagcacaactacctggtcctcgacgtcgacgacatcccccgcgtcgtgcaggaggctttcttcctcgcctcctctggtcgaccagggccggtgcttgtcgacatccccaaggacatccagcagcagatggcggtgcctgtctgggacaagcccatgagtctgcctgggtacattgcgcgccttcccaagccccctgcgactgagttgcttgagcaggtgctgcgtcttgttggtgaatcgcggcgccctgttctttatgtgggcggtggctgcgcagcatctggtgaggagttgcgacgctttgtggagctgactggaatcccggtcacaactactcttatgggcctcggcaacttccccagcgacgacccactgtctctgcgcatgctaggtatgcatgggacggtgtatgcaaattatgcagtggataaggccgatctgttgcttgcacttggtgtgcggtttgatgatcgcgtgacagggaagattgaggcttttgcaagcagggctaagattgtgcacgttgatattgatccggctgagattggcaagaacaagcagccacatgtgtccatctgtgcagatgttaagcttgctttgcagggcatgaatgctcttcttgaaggaagcacatcaaagaagagctttgactttggctcatggaacgatgagttggatcagcagaagagggaattcccccttgggtataaaacatctaatgaggagatccagccacaatatgctattcaggttcttgatgagctgacgaaaggcgaggccatcatcggcacaggtgttgggcagcaccagatgtgggcggcacagtactacacttacaagcggccaaggcagtggttgtcttcagctggtcttggggctatgggatttggtttgccggctgctgctggtgcttctgtggcaaacccaggtgtcactgttgttgacatcgatggagatggtagctttctcatgaacgttcaggagctagctatgatccgaattgagaacctcccagtgaaggtctttgtgctaaacaaccagcacctggggatggtggtgcagttggaggacaggttctataaggccaacagagcgcacacatacttgggaaacccagagaatgaaagtgagatatatccagatttcgtgacgatcgccaaagggttcaacattccagcggtccgtgtgacaaagaagaacgaagtccgcgcagcgataaagaagatgctcgagactccagggccgtacctcttggatataatcgtcccacaccaggagcatgtgttgcctatgatccctagtggtggggctttcaaggatatgatcctggatggtgatggcaggactgtgtactgatgactagctagtcagttaacagatctgccagatcctcggtgtacaaataacccgtcttatcctatgagacgggccggcgtcagtgtgttctggaggaatttttatgtcagagcctttttctttgtgtgcttgatgtagatgccaagggaagcttattggctgttgaagcttgatgcaaaataaattatggaactctgttttttgtttatctaataataactagcaaatatgcttccattgcattgaaactaacagccttttgtgtttccaagttttattttgtgacaatgtcatctatttcaattagttgtggaatcggaaacttgcaggactaacttggaaactccaatccctcagcatcctggactttttcctggtgtaatccatgtagatattattttaatcatcattttagttctggaggtttttccatctccggttttgctcccctttcttcaaaaaaaaaaaaaaaatgccgtaggcgccgcaacgcccacctgttgttcaaactcatgggcacgagtggctcgaagattttatacaacaattgctgtagtttcaccgttgctggtgaagaagcatttttttaaaaaaatatagtggtattcattttaattagtttagttgtgcagcgagcaaaatttggacatgctctgctcggaatctgatcgacctagacacagattagcagcagtagctttgtcatctgttccaagagttgcgatctgatagaagaaaaaaaaaccttcccttcaatgtaaaaccgaaactaacaagaaagaagcacagtgccgtttaggcaagtatggagtacgtattaagcatgtagaaggccatgcatgaaccactaacaagaaagaagcgcagtgccattcaggcaagcataagcatgtagattggcatgcatgaacaactaacagtagatcgtctctggtctgattagaagttttttgggaagccaagaaatcatgtacaactggttccatctcaaattccgtggcaaaaagaggcctaagcaacataaagctttccactggttgccatatatgatttgggcatttcactttgatcttaatgggccttgtaaagcccaagactcatgattatctttagttgatgctcttaattaggtgtgggcaaataattcaaactgtatgtacccgaccaaaaccaaagcaaaaataatcgaaccaaaccgaaaatttaaaaataaccgaatgaaaactaaatcctataactgaaagaactgaaaccgaatcaaaatatttaatgtaaccaaaaatatccgaaatataattatattgtcaaaaatattaataatttctagattaaataattaaaaatacttaaaaatttatataaaatagtaaaaatactcgaaaataaccacaaatattcaaaaacaaccgaaatatcccaaaatattcaaagcaaaataaccgaatggataccaaattttaaaaccgaaaaaactggaacaaaaccaaaatcgaaccaaaatttcaaaaatcgaataaatactaaactttagaacaaaaaaaaacgataaccgaatgtatacgaaccaaagccgaattagataaccgaacgtccaggactactcttaatctttccgccacttatgatttgggctattactttgtttataatgagccttttcaagctcaagttcatgattgtccgtgagatgagaaactgacttgttggattcgaaaccctagctagtattggttaatacttaatacataaatgacctgcattgacatcatcatccaagaaaataaaaattgtatgcttgagatatttagttttcctagctaggttttctttattttagtaccgaatctttaggtgtgccacgttaatttagacccattttttcatacttaccaactgagtctagtttaatcatgactataatcgtataaaatgattcagtcgacgtcattgcgaacgtatataaaatcatccaaattgacgtcattccaaagaggtaagcatgcttatctaagagtccgagcatactaaacaagacgacattttatttgcactccaaatcaaattttgtattgcctaaagaaaaacaatcaaactcaagtttcttaaaattaatttcattcaaactaatcactttcaatatctcacatattattcatgccatttctatttgtctaaacatgatttaaaaaaaaaagtaaaatacaaagattactatgcaaaaactctataaaaaaaaattcaaatttcttatttatttgtgacatcaaattttcaaaataatttttttaattatcggttgatccggtcagtcgataaaaacataaactttcagcgaccgttaaaactttcctactaccgatttagagaaaatcttagcttgaaacgtaattgtaacctgccttcatgcaagtcgcaagatatgtcatcctaagttgtatatgttttctcaaaagatgtatttacttgagaaaatacgtttcaacgttgatggacaaccaattaagaatcaagcacctttcgtaatcaatttaggcttatcgtctaaggtatactgatttacgacagttgactagacttataaggaacaaaataatagaatagtttctaaacacttcacctaatcatagagactaagatggtaattcgtaaacgacaaagcctagtgacactgtccattgtaaaattccacatcatattagtattaaacatatacatgtagtttcctgaacacatgtagtatcaaacacacttcgtggcttcttcctcgaaacctgcggccgctcattaattaagtcatctagttgaaggatcgctatcaactttgtatagaaaagttgggccgaattcgagctcggtacggccagaatggcccggaccgaagcttaccggtcgttgagaacaaatctggaaggccatccttgccttctgtcgtcgggcgcaccggacagtccggtgcacaccggacactgtccggtgcccgatttccttccttaaacatcgcagccgaccgttgccaaccgttgcagatctggcgcaccggacagtccggtgcacaccggacagtccggtgccactttccgaccgttggccagaccacgtgtcgcgcgcagatttcgcggccgaccgttggctcgggccgaccgttggctcaccggaaagtccggtgcacaccggacagtccggtgaattttagccgtacgccgtcggcaaattcccgagagcagcgtcttcaggtcgaggcagcctggcgcaccggacactgtccggtgcaccaccggagagtccggtgccccagaccgaagcagtcttttggctgtacacagccaactcttcttctttcttcttctctctgtttctattacttagacaagtatattagtacacaaaaccaatgtactaaggcttagaaacatacctttacttgtgatttgcactttgttcatccatgggcatagatttacatttaagcacttgtgttgacactcaatcaccaaaatacttagaaatggcccaaaggcacatttccctttcagtctttcatcgaacatcatggtcacgttcttcataccataaaaactagcattcccataaacatttgtctccacgcttcctccatggtatagtgtcactagggtgtccatctattgcaaacatggattactaactcaataatggctaaatactagtgcctcaatacttactaagtagtaaataaataataactgcttactatatagtaaatattaaatgaccacattaaccgaaattacataatctatgaataatgtacgaaaacaatgtatacatgagatcgcgtacgagtccagctaacggtggagaaggtcaagtcggaaggacacctatatacaaaaaatactattgtcaataaaaaatcggcagcacctcccctataaagtgatgtttctaaaacctacaaagaaataacaacacgatggttgccaacacagaaaactgctaccaacaagtatatgttaaaccctatataatcactcactttcctccatccattacactaacaatatgctaccgacttactaactatataatcactaactatatacacgaacaaataaatacctagctaactatttataataacaaatgaatagctaacagactatacattaaaccaagtaatcttgtgctacaaatttatttttcagacagaaaaatctatttagctaactaattaatacaaattaataccaagcaacgatagatgaacatctagttgtctaattagctaactaattaatacaaattaagtagaatccttaccgtggggagatggggcgcgacgaagtgctcgagcttggggcgcggcgaccggcgacgtgaagcttgggggcgcgggggccggacggcgctgcgggcggcatggcgggcggctgcgggcggcggcgcgggcgcaggaaacaaacgacgggagtgggaggaaggagaaagcggcgcgccggtttagtcctagctcggcgccaagatctgtggcgccgagctaggtgccacgatggccgccgcgtcagcaaagctcggcgccaaggcatgttgcgccgagccgtgttagctcggcgtcatagctcatggtgccgagttttgggtctaaaattgcgtttaagtattctagggatctaaacgcaaatatttttcgaaaatagggccgaaaaacaaaaaaaaatcggtcgtttcgtcgagcacatcgtccagcctatcttgcatgtccatcctctctatggttcgcgagccgcgcgcatggcgctccaaaggaggggcgaggttgaatatagacagatggaatgggtggttctctatttatagcgcatgcagtcgtcccctggcacacctatttatatgtgagcgttcctggcactagagagatcgatcgatcgagcttaattgcgccactgctcgttatcctcctcttgcattgcattgcaggtcgtagttgagcagcagcaaccactgcacaggcctaggcgcgccatttaaatatggaaagccatcgcatgcgtgtaggtgctcttgcatggagttcttcgttgctttcttctggaagccgtgacaagagcatcctccaccatgatatccgtgctcaagaagatcatgttagcaagcttaccgggcataaatctgaggtttgtggactcaagtggtcttatgacaatcgtcagcttgcatcgggtggcaatgacaacagacttttcgtttggaatccacattcagtacagccagtactgaagtatactgagcacacagcagctgtcaaagctattgcctggtcacctcatctccatgggctgcttgcatctggtggaggaactgcagatagatgcatacgattttggaatacgaccacaaatgcacacttgagctgtgtggacactggcagccaggtctgcaatcttgcgtggtcaaagaatgtaaatgagcttgttagcacccacggctactctcagaaccaaataattgtttggagatatccaacaatgtcgaagcttgccactttgacagggcatacatacagagtattgtacttagctatttcccctgatggccagaccatagttactggtgctggtgatgaaacgctccggttttggaacgtgttcccctctccaaagtcccagagttctgacagtttaagttgcgtcggaggaacatctttcgttagaagctacatccggtgaatttaaatgcccgggcgatcgctcgaggcgtacctagtggtaccacatggttaacctagacttgtccatcttctggattggccaacttaattaatgtatgaaataaaaggatgcacacatagtgacatgctaatcactataatgtgggcatcaaagttgtgtgttatgtgtaattactagttatctgaataaaagagaaagagatcatccatatttcttatcctaaatgaatgtcacgtgtctttataattctttgatgaaccagatgcatttcattaaccaaatccatatacatataaatattaatcatatataattaatatcaattgggttagcaaaacaaatctagtctaggtgtgttttgcgaatgcggccgccaccgcggtggagctcgaattccggtccgggcctagaaggccagcttcaagtttgtacaaaaaagcaggctccggccagaatggcccggaccgggttaccgaattcgagctcggtaccctgggatccgatatcgatgggccctggccgaagcttggtcacccggtccgggcctagaaggccgatctcccgggcacccagctttcttgtacaaagtggccgttaacggatcggccagaatggcccggaccgaagcttgcatgcctgcagtgcagcgtgacccggtcgtgcccctctctagagataatgagcattgcatgtctaagttataaaaaattaccacatattttttttgtcacacttgtttgaagtgcagtttatctatctttatacatatatttaaactttactctacgaataatataatctatagtactacaataatatcagtgttttagagaatcatataaatgaacagttagacatggtctaaaggacaattgagtattttgacaacaggactctacagttttatctttttagtgtgcatgtgttctcctttttttttgcaaatagcttcacctatataatacttcatccattttattagtacatccatttagggtttagggttaatggtttttatagactaatttttttagtacatctattttattctattttagcctctaaattaagaaaactaaaactctattttagtttttttatttaataatttagatataaaatagaataaaataaagtgactaaaaattaaacaaataccctttaagaaattaaaaaaactaaggaaacatttttcttgtttcgagtagataatgccagcctgttaaacgccgtcgacgagtctaacggacaccaaccagcgaaccagcagcgtcgcgtcgggccaagcgaagcagacggcacggcatctctgtcgctgcctctggacccctctcgagagttccgctccaccgttggacttgctccgctgtcggcatccagaaattgcgtggcggagcggcagacgtgagccggcacggcaggcggcctcctcctcctctcacggcaccggcagctacgggggattcctttcccaccgctccttcgctttcccttcctcgcccgccgtaataaatagacaccccctccacaccctctttccccaacctcgtgttgttcggagcgcacacacacacaaccagatctcccccaaatccacccgtcggcacctccgcttcaaggtacgccgctcgtcctcccccccccccctctctaccttctctagatcggcgttccggtccatgcatggttagggcccggtagttctacttctgttcatgtttgtgttagatccgtgtttgtgttagatccgtgctgctagcgttcgtacacggatgcgacctgtacgtcagacacgttctgattgctaacttgccagtgtttctctttggggaatcctgggatggctctagccgttccgcagacgggatcgatttcatgattttttttgtttcgttgcatagggtttggtttgcccttttcctttatttcaatatatgccgtgcacttgtttgtcgggtcatcttttcatgcttttttttgtcttggttgtgatgatgtggtctggttgggcggtcgttctagatcggagtagaattctgtttcaaactacctggtggatttattaattttggatctgtatgtgtgtgccatacatattcatagttacgaattgaagatgatggatggaaatatcgatctaggataggtatacatgttgatgcgggttttactgatgcatatacagagatgctttttgttcgcttggttgtgatgatgtggtgtggttgggcggtcgttcattcgttctagatcggagtagaatactgtttcaaactacctggtgtatttattaattttggaactgtatgtgtgtgtcatacatcttcatagttacgagtttaagatggatggaaatatcgatctaggataggtatacatgttgatgtgggttttactgatgcatatacatgatggcatatgcagcatctattcatatgctctaaccttgagtacctatctattataataaacaagtatgttttataattattttgatcttgatatacttggatgatggcatatgcagcagctatatgtggatttttttagccctgccttcatacgctatttatttgcttggtactgtttcttttgtcgatgctcaccctgttgtttggtgttacttctgcaggtcgactttaacttagcctaggatccatggcctcctccgagaacgtcatcaccgagttcatgcgcttcaaggtgcgcatggagggcaccgtgaacggccacgagttcgagatcgagggcgagggcgagggccgcccctacgagggccacaacaccgtgaagctgaaggtgaccaagggcggccccctgcccttcgcctgggacatcctgtccccccagttccagtacggctccaaggtgtacgtgaagcaccccgccgacatccccgactacaagaagctgtccttccccgagggcttcaagtgggagcgcgtgatgaacttcgaggacggcggcgtggcgaccgtgacccaggactcctccctgcaggacggctgcttcatctacaaggtgaagttcatcggcgtgaacttcccctccgacggccccgtgatgcagaagaagaccatgggctgggaggcctccaccgagcgcctgtacccccgcgacggcgtgctgaagggcgagacccacaaggccctgaagctgaaggacggcggccactacctggtggagttcaagtccatctacatggccaagaagcccgtgcagctgcccggctactactacgtggacgccaagctggacatcacctcccacaacgaggactacaccatcgtggagcagtacgagcgcaccgagggccgccaccacctgttcctgtagggtaccacatggttaacctagacttgtccatcttctggattggccaacttaattaatgtatgaaataaaaggatgcacacatagtgacatgctaatcactataatgtgggcatcaaagttgtgtgttatgtgtaattactagttatctgaataaaagagaaagagatcatccatatttcttatcctaaatgaatgtcacgtgtctttataattctttgatgaaccagatgcatttcattaaccaaatccatatacatataaatattaatcatatataattaatatcaattgggttagcaaaacaaatctagtctaggtgtgttttgcgaatgcggccgccaccgcggtggagctcgaattccggtccgggcctagaaggccagcttcggccgccccgggcaactttattatacaaagttgatagatcctcatgtcttcatcgtaagcttaaacaggccagaatggcctctggattcagcggcctagaaggccgaagtacttggtcttcctagtcgagtagatcacattcaagcttggtcacccggtccgtcaatattctgattccgatgacttcgtaggttcctagctcaagccgctcgtgtccaagcgtcacttacgattagctaatgattacggcatctaggaccgactagtggcgcgccgactagctagctaaggtaccgagctcgaattcattccgattaatcgtggcctcttgctcttcaggatgaagagctatgtttaaacgtgcaagcgctactagacaattcagtacattaaaaacgtccgcaatgtgttattaagttgtctaagcgtcaatttgtttacaccacaatatatcctgcca

SEQ ID NO: 39 - DNA, 29147 bp, Artificial Sequence
  RX000010
gtttacccgccaatatatcctgtcaaacactgatagtttaaactgaaggcgggaaacgacaatctgatcatgagcggagaattaagggagtcacgttatgacccccgccgatgacgcgggacaagccgttttacgtttggaactgacagaaccgcaacgttgaaggagccactcagcaagctggtacgattgtaatacgactcactatagggcgaattgagcgctgtttaaacgctcttcaactggaagagcggttacgctgtttaaacgctcttcaactggaagagcggttactaccggttcactagctagctgctaatcgagctagttaccctatgaggtgacatgaagcgctcacggttactatgacggttagcttcacgactgttggtggcagtagcgtacgacttagctatagttccggacttacccttaagcgatttaaatctgcggttaccgaattcgagctcggtaccctgggatctgcccttactttaacgcctctaaccaacacccctttatctttataaggaacaataaacagaatttgccccactgttctaaatcacctaataatatccccagctaaaaacaataaaggtttcctagaattaagacaagcatgactgttcctccaggagggtttggaacattgttgcagtcttgcagatacgggcgaagggtgagaaacagagcggagggctggaggtgacctcggtagtcgacgccggagttgagcttgacaacgacggggcggcccctgatggacttgaggaagtccgatggcgtcttcaccgtcccgccggcgcccgaggcgggcctgtcgctgccgccgccgccgctgctcatcttgcgcgctgtgcccccggcggtgtccctgtgttgcggatcgcgggtgggccaggtggatgcgagggcgacccgtttggactccggccggagccgccggatccctggtcggtgtcagtgccgtttactctgggccccacgtgtcagtaccgtctgtagatgacaacaacccgtcgtccacagtcatgtccaaaatatcctttcttcttttttttcgattcggatatctatcttccttttttttttccaaaaatcttcttgacgcaccagcgcgcacgtttgtggtaaacgccgacacgtcggtcccacgtcgatagaccccacccaccagtgagtagcgtgtacgtattcgggggtgacggacgtgtcgccgtcgtcttgctagtcccattcccatctgagccacacatctctgaacaaaaaaaaggagggaggcctccacgcacatccccctccgtgccacccgccccaaaccctcgcgccgcctccgagacagccgccgcaaccatggccaccgccgccgccgcgtctaccgcgctcactggcgccactaccgctgcgcccaaggcgaggcgccgggcgcacctcctggccacccgccgcgccctcgccgcgcccatcaggtgctcagcggcgtcacccgccatgccgatggctcccccggccaccccgctccggccgtggggccccaccgagccccgcaagggtgctgacatcctcgtcgagtccctcgagcgctgcggcgtccgcgacgtaagtttctgcttctacctttgatatatatataataattatcattaattagtagtaatataatatttcaaatatttttttcaaaataaaagaatgtagtatatagcaattgcttttctgtagtttataacttcgtatagcatacattatacgaagttatacttttctaatatatgaccaaaatttgttaccgaattcaggcgacccatcgctgctttgtctacatcatgttcttcatcatcctccccaggcgacgcgtgctgctgttcttattcagactaccgttcgagtgactgcatggcgtacatctttctgcatcgactttgtacggctacatcgaacatatacacgagatgtctcgtgtgaatagagtcactaatgccttaagcatcggttactccgtagggtacattctgttcttcttatttgtgcatatttttattgttgtttactgattatacgagtagttatacatacatgcacatacatatcatcacatatatcacaatatttttctaaattaaattaaaactaaaaatgactaaatttctaacaccaacgacattgtaatgttttctccaacaactttacctattctacattgttctatttcgaatttcactctataaacaacatagtctacaatggaaaacagtgctttgtacgactatatacgcgatgtgtggctacaacataagacaatatagtcgtttgaagattgaacctatatatcggtacggttaatccgtctatgtacgtgggcatgacgaacacccgtgataacgaaggattaacgtgcacaatcataaatccaaagtaggagcggtgcatgatgagaatcgctctcagtactcgacataatgaaccttacgaggtacaacaggcaggcaggcagggaccaggggccgcctttatttcaggctcgctggccccacgggcgtgctgcgtgcacgaagggcactaccccaacctctcaccgaaaaccgcgctggatcggcaaatcaaacgaggtggtgccccgtgcccactctccacgtccacggcaccatccctctgcagccgctcaccagccatgccgtgtcgcggaacggcacaaccacccccaacccactcacgaaaccccgtcccggccgtgcccgtgtcggtccgcgctcggcaacgaggcggcccgcgctgctgagtcccctggacacccgacaccctgtcggccctttgtttattcatcccgaaatctcatctgcccccacggccgactgcgctgcgccgcccggatatatatacccatcgttatcgatcgactggggactctatcagtgatagagtctagaggatcgctcaggaaggccgctgagatagaggcatggcggccaatgcgggcggcggtggagcgggaggaggcagcggcagcggcagcgtggctgcgccggcggtgtgccgccccagcggctcgcggtggacgccgacgccggagcagatcaggatgctgaaggagctctactacggctgcggcatccggtcgcccagctcggagcagatccagcgcatcaccgccatgctgcggcagcacggcaagatcgagggcaagaacgtcttctactggttccagaaccacaaggcccgcgagcgccagaagcgccgcctcaccagcctcgacgtcaacgtgcccgccgccggcgcggccgacgccaccaccagccaactcggcgtcctctcgctgtcgtcgccgccgccttcaggcgcggcgcctccctcgcccaccctcggcttctacgccgccggcaatggcggcggatcggctgtgctgctggacacgagttccgactggggcagcagcggcgctgccatggccaccgagacatgcttcctgcaggactacatgggcgtgacggacacgggcagctcgtcgcagtggccacgcttctcgtcgtcggacacgataatggcggcggccgcggcgcgggcggcgacgacgcgggcgcccgagacgctccctctcttcccgacctgcggcgacgacggcggcagcggtagcagcagctacttgccgttctggggtgccgcgtccacaactgccggcgccacttcttccgttgcgatccagcagcaacaccagctgcaggagcagtacagcttttacagcaacagcaacagcacccagctggccggcaccggcaaccaagacgtatcggcaacagcagcagcagccgccgccctggagctgagcctcagctcatggtgctccccttaccctgctgcagggagtatgtgagagcaacgcgagctgccactgctcttcactggtaccgttaacagatcattcgacaaagcagcattagtccgttgatcggtggaagaccactcgtcagtgttgagttgaatgtttgatcaataaaatacggcaatgctgtaagggttgttttttatgccattgataatacactgtactgttcagttgttgaactctatttcttagccatgccaagtgcttttcttattttgaataacattacagcaaaaagttgaaagacaaaaaaaaaaacccccgaacagagtgctttgggtcccaagcttctttagactgtgttcggcgttccccctaaatttctccccctatatctcactcacttgtcacatcagcgttctctttccccctatatctccacgctctacagcagttccacctatatcaaacctctataccccaccacaacaatattatatactttcatcttcaactaactcatgtaccttccaatttttttctactaataattatttacgtgcacagaaacttagcaaggagagagagagcggggtgacccaccttgctagttggatattacctcttctcttcaaagtatccttgaacgctcaccggttatcaaatctctacactatagctctgtagtcttgctagatagttagttctttagctctcggtgaccaagcttggcgcgatcaagcttatcgataccgtcgacctcgaagcttggtcacccggtccgggcctagaaggccagcttcaagtttgtacaaaaaagcaggctccggccagaatggcccggaccgggttaccgaattcttaccctagctccctgcggctgttacgcggtcccccatcaatcttctgttcttgcggttgtagcctgtgtaacagtgctagagtatgtatgataaataggttttaagtctgcttacatgacattttttattgtggaagagacatataaaaattagagagagtggttctcatgcaacggcggacggcccggtgctaaaagagcttcaagacaaaataatgaaacaggaagagagtagatttatctaagagccaactttattatatgaatgtgtttattgttggctttagatgatatggtaaggagttagagctaataatagataggctctattattattattattaattaaactcgctctaaggaggaaagtgggaggaagggacgaggacgaagactactggaagcatcgtgcatggatgatggatgtggtgtctcttaatgtaggtggccggaggatgtacgtgttaattgcgcgataagcactcagatccaaccgcaaactacctccacactgacacactgatagagagaaagagagacctccgacgactgccgccgcagatgagccacgtacgtatacgacgtctgccggccggctcaggctgccgccatcaccctgctcgaaagtcgcgttaggcggcgccagctacataggagtatctagtctagccagttagtatactactactgcgctgatgatgaattaactctgcatagatactgtacttgcctccctccaacacccaaccacctcctgctcggctcttaataacttggacacggatcgatgccatccaaggaagaacacgacgacgacgacggaacatccaccatgcaagcttgcatccatacgccgatacgcgtgcatccatccatccaccattatttccattttccaccgatcacacgtacacaggcctatttaaggagcgacatcccactgcaactctcctcaccactcatcaccagctagctctagcaaagcacttgccatctaccgaccgccgcattccaaacagcccgacgagctagcagagcggcaggcacctccctcctcaaggaacccatggccactgtgaacaactggctcgctttctccctctccccgcaggagctgccgccctcccagacgacggactccacactcatctcggccgccaccgccgaccatgtctccggcgatgtctgcttcaacatcccccaagattggagcatgaggggatcagagctttcggcgctcgtcgcggagccgaagctggaggacttcctcggcggcatctccttctccgagcagcatcacaaggccaactgcaacatgatacccagcactagcagcacagtttgctacgcgagctcaggtgctagcaccggctaccatcaccagctgtaccaccagcccaccagctcagcgctccacttcgcggactccgtaatggtggcttcctcggccggtgtccacgacggcggtgccatgctcagcgcggccgccgctaacggtgtcgctggcgctgccagtgccaacggcggcggcatcgggctgtccatgattaagaactggctgcggagccaaccggcgcccatgcagccgagggtggcggcggctgagggcgcgcaggggctctctttgtccatgaacatggcggggacgacccaaggcgctgctggcatgccacttctcgctggagagcgcgcacgggcgcccgagagtgtatcgacgtcagcacagggtggagccgtcgtcgtcacggcgccgaaggaggatagcggtggcagcggtgttgccggcgctctagtagccgtgagcacggacacgggtggcagcggcggcgcgtcggctgacaacacggcaaggaagacggtggacacgttcgggcagcgcacgtcgatttaccgtggcgtgacaaggcatagatggactgggagatatgaggcacatctttgggataacagttgcagaagggaagggcaaactcgtaagggtcgtcaagtctatttaggtggctatgataaagaggagaaagctgctagggcttatgatcttgctgctctgaagtactggggtgccacaacaacaacaaattttccagtgagtaactacgaaaaggagctcgaggacatgaagcacatgacaaggcaggagtttgtagcgtctctgagaaggaagagcagtggtttctccagaggtgcatccatttacaggggagtgactaggcatcaccaacatggaagatggcaagcacggattggacgagttgcagggaacaaggatctttacttgggcaccttcagcacccaggaggaggcagcggaggcgtacgacatcgcggcgatcaagttccgcggcctcaacgccgtcaccaacttcgacatgagccgctacgacgtgaagagcatcctggacagcagcgccctccccatcggcagcgccgccaagcgcctcaaggaggccgaggccgcagcgtccgcgcagcaccaccacgccggcgtggtgagctacgacgtcggccgcatcgcctcgcagctcggcgacggcggagccctggcggcggcgtacggcgcgcactaccacggcgccgcctggccgaccatcgcgttccagccgggcgccgccagcacaggcctgtaccacccgtacgcgcagcagccaatgcgcggcggcgggtggtgcaagcaggagcaggaccacgcggtgatcgcggccgcgcacagcctgcaggacctccaccacctgaacctgggcgcggccggcgcgcacgactttttctcggcagggcagcaggccgccgccgctgcgatgcacggcctgggtagcatcgacagtgcgtcgctcgagcacagcaccggctccaactccgtcgtctacaacggcggggtcggcgacagcaacggcgccagcgccgtcggcggcagtggcggtggctacatgatgccgatgagcgctgccggagcaaccactacatcggcaatggtgagccacgagcaggtgcatgcacgggcctacgacgaagccaagcaggctgctcagatggggtacgagagctacctggtgaacgcggagaacaatggtggcggaaggatgtctgcatgggggactgtcgtgtctgcagccgcggcggcagcagcaagcagcaacgacaacatggccgccgacgtcgggcatggcggcgcgcagctcttcagtgtctggaacgacacttaagcgtacctagtggtacctgacatcttatagtctgcaacctctcgtgtctgaattcctatctttatcaagtgttattgcttccacgactataggacagctttcgtcgaaagcttttgctcatgtgatctcgaaggattcatctagtctgatttttcgtgacttgtatcggttttattggattcatccaacatatatcaataaaaaatgagttgtgtttcctttcttcctagttcagttaaaattatttccctcctgcgcttgtgctgtaattgtctgtgtacctgttgtttgtgactgtgttagttcccttggatatgatttcgtatttgatatgtacatggagatagcttagcttcattattggagtatgaagttagtatgacatagtcactctcctggaaaattgacactgcaaaccatatttttattctgaaccacaaatcctagtcagtccgctggcatatgccgtccgtttgctgaatccagaacgtgggtttggagatgtacggctgagatgcctctatgcgaaggggatttcgtggtgaaacgagatgggagtagagcaacgcccgtggaagatgcttcaaacttccacacttttgagcaacgatcggcagtagtaaggtagacgatttcaagatcaaagcatatgaagataaacaacatcaacaacaaaatttgttggggttctatagagagaaacagagctacatacatacactgttttgtatctaccatctgagatgatgaaaagatgaaaaactaaagaatgccccggcgccaacgccaggacacgccgcgcgcgcgtcacccgagccatctcttgacccagccggcgctgtatatttacacacgttgcagcatcgatcaccacctgttcgatcgcgtcgccgtcaccgggatctgagtcgaaacctagacttgtccatcttctggattggccaacttaattaatgtatgaaataaaaggatgcacacatagtgacatgctaatcactataatgtgggcatcaaagttgtgtgttatgtgtaattactagttatctgaataaaagagaaagagatcatccatatttcttatcctaaatgaatgtcacgtgtctttataattctttgatgaaccagatgcatttcattaaccaaatccatatacatataaatattaatcatatataattaatatcaattgggttagcaaaacaaatctagtctaggtgtgttttgcgaatgcgaccttcttatgtgcttctagtctccaaatgtggttgatagttattttgctctaagatcaacagtaatgaagtataaatcatcgttgtggtgtgctactcggttaattgagcattaacacacacaaacatgacgaggatggtataatctccaaaaatgtgtactttgttaggtgggaccctatagccttgattaatgtgctatgttaggcatgcctggaaacgtgtgacgcatatgttttgtgaacctgttgatattatatgtgcttttatattaccatattttattaaaatactaatatttattactagtaagatataacattctatctagcttaaaaactaaccataaatattccataataactagatttaccaaactaatatactaaatatacataataaatacaaaattaacaagacaataatcaatatttatgagcttaatatatttagacattatggttggtcgacgataatcatgctaacttttcgtaattgcttgattgaaatatgcttagaataatgcctctttgttctacatggcaaatagggaccattatggtgtaacaccctgggaaccacaaacaccccgaaatgctactaaactacacaactaaccttcatatataaaatttcgacagcatctcctttgaaaatttgcatagacgtggaagcaacagagtataaacagatatcatgataagaaaacatactagacattaataatctgctagaaatgggaagaatcctaacttgacgactgcgtaactgactagagtcacacttagctgaccctagtcacttacaactgacttcgtgtcctagatcgatgggccctggccgaagcttggtcacccggtccgggcctagaaggccagcttcaagtttgtaccctggagcttgccgagtgccatccttggacactcgataaagtatattttattttttttattttgccaaccaaactttttgtggtatgttcctacactatgtagatctacatgtaccattttggcacaattacatatttacaaaaatgttttctataaatattagatttagttcgtttatttgaatttcttcggaaaattcacatttaaactgcaagtcactcgaaacatggaaaaccgtgcatgcaaaataaatgatatgcatgttatctagcacaagttacgaccgatttcagaagcagaccagaatcttcaagcaccatgctcactaaacatgaccgtgaacttgttatctagttgtttaaaaattgtataaaacacaaataaagtcagaaattaatgaaacttgtccacatgtcatgatatcatatatagaggttgtgataaaaatttgataatgtttcggtaaagttgtgacgtactatgtgtagaaacctaagtgacctacacataaaatcatagagtttcaatgtagttcactcgacaaagactttgtcaagtgtccgataaaaagtactcgacaaagaagccgttgtcgatgtactgttcgtcgagatctctttgtcgagtgtcacactaggcaaagtctttacggagtgtttttcaggctttgacactcggcaaagcgctcgattccagtagtgacagtaatttgcatcaaaaatagctgagagatttaggccccgtttcaatctcacgggataaagtttagcttcctgctaaactttagctatatgaattgaagtgctaaagtttagtttcaattaccaccattagctctcctgtttagattacaaatggctaaaagtagctaaaaaatagctgctaaagtttatctcgcgagattgaaacagggccttaaaatgagtcaactaatagaccaactaattattagctattagtcgttagcttctttaatctaagctaaaaccaactaatagcttatttgttgaattacaattagctcaacggaattctctgtttttctaaaaaaaaactgcccctctcttacagcaaattgtccgctgcccgtcgtccagatacaatgaacgtacctagtaggaactcttttacacgctcggtcgctcgccgcggatcggagtccccggaacacgacaccactgtggaacacgacaaagtctgctcagaggcggccacaccctggcgtgcaccgagccggagcccggataagcacggtaaggagagtacggcgggacgtggcgacccgtgtgtctgctgccacgcagccttcctccacgtagccgcgcggccgcgccacgtaccagggcccggcgctggtataaatgcgcgccacctccgctttagttctgcatacagccaacccaaggatgtccaacctgctcacggttcaccagaaccttccggctcttccagtggacgcgacgtccgatgaagtcaggaagaacctcatggacatgttccgcgacaggcaagcgttcagcgagcacacctggaagatgctgctctccgtctgccgctcctgggctgcatggtgcaagctgaacaacaggaagtggttccccgctgagcccgaggacgtgagggattaccttctgtacctgcaagcgcgaggtttgtttctgcttctacctttgatatatatataataattatcattaattagtagtaatataatatttcaaatatttttttcaaaataaaagaatgtagtatatagcaattgcttttctgtagtttataagtgtgtatattttaatttataacttttctaatatatgaccaaaacatggtgatgcctaggtctggcagtgaagaccatccagcaacaccttggacaactgaacatgcttcacaggcgctccggcctcccgcgccccagcgactcgaacgccgtgagcctcgtcatgcgccgcatcaggaaggaaaacgtcgatgccggcgaaagggcaaagcaggccctcgcgttcgagaggaccgatttcgaccaggtccgcagcctgatggagaacagcgacaggtgccaggacattaggaacctggcgttcctcggaattgcatacaacacgctcctcaggatcgcggaaattgcccgcattcgcgtgaaggacattagccgcaccgacggcggcaggatgcttatccacattggcaggaccaagacgctcgtttccaccgcaggcgtcgaaaaggccctcagcctcggagtgaccaagctcgtcgaacgctggatctccgtgtccggcgtcgcggacgacccaaacaactacctcttctgccgcgtccgcaagaacggggtggctgcccctagcgccaccagccaactcagcacgagggccttggaaggtattttcgaggccacccaccgcctgatctacggcgcgaaggatgacagcggtcaacgctacctcgcatggtccgggcactccgcccgcgttggagctgctagggacatggcccgcgccggtgtttccatccccgaaatcatgcaggcgggtggatggacgaacgtgaacattgtcatgaactacattcgcaaccttgacagcgagacgggcgcaatggttcgcctcctggaagatggtgactgagctagacccagctttcttgtacaaagtggccgttaacggatccagacttgtccatcttctggattggccaacttaattaatgtatgaaataaaaggatgcacacatagtgacatgctaatcactataatgtgggcatcaaagttgtgtgttatgtgtaattactagttatctgaataaaagagaaagagatcatccatatttcttatcctaaatgaatgtcacgtgtctttataattctttgatgaaccagatgcatttcattaaccaaatccatatacatataaatattaatcatatataattaatatcaattgggttagcaaaacaaatctagtctaggtgtgttttgcgaattgcggcaagctgttaccgaattcctgcccttaaggccaattgttcaagattcattcaacaattgaaacatctcccatgattaaatcagtataaggttgctatggtcttgcttgacaaagtttttttttgagggaatttcaactaaatttttgagtgaaactatcaaatactgattttaaaaaatttttataaaaggaagcgcagagataaaaggccatctatgctacaaaagtacccaaaaatgtaatcctaaagtatgaattgcattttttttttgtttggacgaaaggaaaggagtattaccacaagaatgatatcatcttcatatttagatcttttttgggtaaagcttgagattctctaaatatagagaaatcagaagaaaaaaaaaccgtgttttggtggttttgatttctagcctccacaataactttgacggcgtcgacaagtctaacggacaccaagcagcgaaccaccagcgccgagccaagcgaagcagacggccgagacgttgacaccttcggcgcggcatctctcgagagttccgctccggcgctccacctccaccgctggcggtttcttattccgttccgttccgcctcctgctctgctcctctccacaccacacggcacgaaaccgttacggcaccggcagcacccagcacgggagaggggattcctttcccaccgttccttccctttccgccccgccgctataaatagccagccccatccccagcttttttccccaatctcatctcctctctcctgttgttcggagcacacgcacaatccgatcgatccccaaatccccttcgtctctcctcgcgagcctcgtggatcccagcttcaaggtacggcgatcgatcatcccccctccttctctctaccttcttttctctagactacatcggatggcgatccatggttagggcctgctagtttcccttcctgttttgtcgatggctgcgaggcacaatagatctgatggcgttatgacggctaacttgtcatgttgttgcgatttatagtccctttaggagatcagtttaatttctcggatggttcgagatcggtggtccatggttagtaccctaagatccgcgctgttagggttcgtagatggaggcgacctgttctgattgttaacttgtcagtacctgggaaatcctgggatggttctagctcgtccgcagatgagatcgatttcatgatcctctgtatcttgtttcgttgcctaggttccgtctaatctatccgtggtatgatgtagatgttttgatcgtgctaactacgtcttgtaaagttaattgtcaggtcataatttttagcatgcctttttttttgtttggttttgtctaattgggctgtcgttctagatcagagtagaagactgttccaaactacctgctggatttattgaacttggatctgtatgtgtgtcacatatcttcataaattcatgattaagatggattgaaatatcttttatctttttggtatggatagttctatatgttggtgtggctttgttagatgtatacatgcttagatacatgaagcaacgtgctgctactgtttagtaattgctgttcatttgtctaataaacagataaggatatgtatttatgttgctgttggttttgctggtactttgttggatacaaatgcttcaatacagaaaacagcatgctgctacgatttaccatttatctaatcttatcatatgtctaatctaataaacaaacatgcttttaaattatcttcatatgcttggatgatggcatacacagcggctatgtgtggttttttaaatacccagcatcatgggcatgcatgacactgctttaatatgctttttatttgcttgagactgtttcttttgtttatactgaccctttagttcggtgactcttctgcaggtcgactttaacttagcctaggatccatggcccagtccaagcacggcctgaccaaggagatgaccatgaagtaccgcatggagggctgcgtggacggccacaagttcgtgatcaccggcgagggcatcggctaccccttcaagggcaagcaggccatcaacctgtgcgtggtggagggcggccccttgcccttcgccgaggacatcttgtccgccgccttcatgtacggcaaccgcgtgttcaccgagtacccccaggacatcgtcgactacttcaagaactcctgccccgccggctacacctgggaccgctccttcctgttcgaggacggcgccgtgtgcatctgcaacgccgacatcaccgtgagcgtggaggagaactgcatgtaccacgagtccaagttctacggcgtgaacttccccgccgacggccccgtgatgaagaagatgaccgacaactgggagccctcctgcgagaagatcatccccgtgcccaagcagggcatcttgaagggcgacgtgagcatgtacctgctgctgaaggacggtggccgcttgcgctgccagttcgacaccgtgtacaaggccaagtccgtgccccgcaagatgcccgactggcacttcatccagcacaagctgacccgcgaggaccgcagcgacgccaagaaccagaagtggcacctgaccgagcacgccatcgcctccggctccgccttgccctccggactcagatctcgatagggtaccaatggccagttaacagatccagctgctgctgttctagggttcacaagtctgcctatttgtcttccccaatggagctatggttgtctggtctggtccttggtcgtgtcccgtttcattgtgtactatttacctgtaatgtgtatccttaagtctggtttgatggtgtctgaaacgttttgctgtggtagagcagcatggaagaactataatgaataagtgatccctaatcattgtgtccaaattttgcttctgctatacccttttgtgctgtttcttatgttttgcttaaaaatttgatctgacaaacaaatttgtctaaattatgctcttgttctgactgtgtactgtacacatttgtattgctaccggtttggcacatagttttctctttgattgcagatcaaacccttctgattgcagattgcttggctatggctgatgtgctcactgttcttctttagcttgtatattgctgatggtggcttggctacggctgaaaaagttgctgctgcgccgacttggcaactgttgctccagtaatgctttgtcctctcttcctagccgccgacttggcacttggcagctgttgctcctgtaatgcgttgttatctcttatctcttgagatgtactatgattttgaggctgtttgacttgtgccagattgccagtgctgatgctatattatctcaggtttttatgctagtatatgttttactgtgtgctgcctgtgtcgagttacgtaatctattgaaccgctatgcgtgttgatgccctgttgttgcttgccagattgatgcccctgttgcttgcagcttgcaagctgtagtgaaatcctaaaattcgaaaccaaatctattctgaacttttgaagatctgtgatgtccggaagaaaagattcaaacagataaacgggactctccagaatctataaaataaatgatcgacaaacgctttgctttggtaggcttcctagttagttagcggaccgaagcttcggtccgggcctagaaggccagcttcggccgccccatttcaaatatttttttcaaaataaaagaatgtagtatatagcaattgcttttctgtagtttataacttcgtatagcatacattatacgaagttatacttttctaatatatgaccaaaatttgttgatgtgcaggtcttcgcctaccccggcggcgcgtccatggagatccaccaggcactcacccgctcccccgtcatcgccaaccacctcttccgccacgagcaaggggaggcctttgccgcctccggctacgcgcgctcctcgggccgcgtcggcgtctgcatcgccacctccggccccggcgccaccaacctagtctccgcgctcgccgacgcgctgctcgattccgtccccatggtcgccatcacgggacaggtggcgcgacgcatgattggcaccgacgccttccaggagacgcccatcgtcgaggtcacccgctccatcaccaagcacaactacctggtcctcgacgtcgacgacatcccccgcgtcgtgcaggaggctttcttcctcgcctcctctggtcgaccagggccggtgcttgtcgacatccccaaggacatccagcagcagatggcggtgcctgtctgggacaagcccatgagtctgcctgggtacattgcgcgccttcccaagccccctgcgactgagttgcttgagcaggtgctgcgtcttgttggtgaatcgcggcgccctgttctttatgtgggcggtggctgcgcagcatctggtgaggagttgcgacgctttgtggagctgactggaatcccggtcacaactactcttatgggcctcggcaacttccccagcgacgacccactgtctctgcgcatgctaggtatgcatgggacggtgtatgcaaattatgcagtggataaggccgatctgttgcttgcacttggtgtgcggtttgatgatcgcgtgacagggaagattgaggcttttgcaagcagggctaagattgtgcacgttgatattgatccggctgagattggcaagaacaagcagccacatgtgtccatctgtgcagatgttaagcttgctttgcagggcatgaatgctcttcttgaaggaagcacatcaaagaagagctttgactttggctcatggaacgatgagttggatcagcagaagagggaattcccccttgggtataaaacatctaatgaggagatccagccacaatatgctattcaggttcttgatgagctgacgaaaggcgaggccatcatcggcacaggtgttgggcagcaccagatgtgggcggcacagtactacacttacaagcggccaaggcagtggttgtcttcagctggtcttggggctatgggatttggtttgccggctgctgctggtgcttctgtggcaaacccaggtgtcactgttgttgacatcgatggagatggtagctttctcatgaacgttcaggagctagctatgatccgaattgagaacctcccagtgaaggtctttgtgctaaacaaccagcacctggggatggtggtgcagttggaggacaggttctataaggccaacagagcgcacacatacttgggaaacccagagaatgaaagtgagatatatccagatttcgtgacgatcgccaaagggttcaacattccagcggtccgtgtgacaaagaagaacgaagtccgcgcagcgataaagaagatgctcgagactccagggccgtacctcttggatataatcgtcccacaccaggagcatgtgttgcctatgatccctagtggtggggctttcaaggatatgatcctggatggtgatggcaggactgtgtactgatgactagctagtcagttaacagatctgccagatcctcggtgtacaaataacccgtcttatcctatgagacgggccggcgtcagtgtgttctggaggaatttttatgtcagagcctttttctttgtgtgcttgatgtagatgccaagggaagcttattggctgttgaagcttgatgcaaaataaattatggaactctgttttttgtttatctaataataactagcaaatatgcttccattgcattgaaactaacagccttttgtgtttccaagttttattttgtgacaatgtcatctatttcaattagttgtggaatcggaaacttgcaggactaacttggaaactccaatccctcagcatcctggactttttcctggtgtaatccatgtagatattattttaatcatcattttagttctggaggtttttccatctccggttttgctcccctttcttcaaaaaaaaaaaaaaaatgccgtaggcgccgcaacgcccacctgttgttcaaactcatgggcacgagtggctcgaagattttatacaacaattgctgtagtttcaccgttgctggtgaagaagcatttttttaaaaaaatatagtggtattcattttaattagtttagttgtgcagcgagcaaaatttggacatgctctgctcggaatctgatcgacctagacacagattagcagcagtagctttgtcatctgttccaagagttgcgatctgatagaagaaaaaaaaaccttcccttcaatgtaaaaccgaaactaacaagaaagaagcacagtgccgtttaggcaagtatggagtacgtattaagcatgtagaaggccatgcatgaaccactaacaagaaagaagcgcagtgccattcaggcaagcataagcatgtagattggcatgcatgaacaactaacagtagatcgtctctggtctgattagaagttttttgggaagccaagaaatcatgtacaactggttccatctcaaattccgtggcaaaaagaggcctaagcaacataaagctttccactggttgccatatatgatttgggcatttcactttgatcttaatgggccttgtaaagcccaagactcatgattatctttagttgatgctcttaattaggtgtgggcaaataattcaaactgtatgtacccgaccaaaaccaaagcaaaaataatcgaaccaaaccgaaaatttaaaaataaccgaatgaaaactaaatcctataactgaaagaactgaaaccgaatcaaaatatttaatgtaaccaaaaatatccgaaatataattatattgtcaaaaatattaataatttctagattaaataattaaaaatacttaaaaatttatataaaatagtaaaaatactcgaaaataaccacaaatattcaaaaacaaccgaaatatcccaaaatattcaaagcaaaataaccgaatggataccaaattttaaaaccgaaaaaactggaacaaaaccaaaatcgaaccaaaatttcaaaaatcgaataaatactaaactttagaacaaaaaaaaacgataaccgaatgtatacgaaccaaagccgaattagataaccgaacgtccaggactactcttaatctttccgccacttatgatttgggctattactttgtttataatgagccttttcaagctcaagttcatgattgtccgtgagatgagaaactgacttgttggattcgaaaccctagctagtattggttaatacttaatacataaatgacctgcattgacatcatcatccaagaaaataaaaattgtatgcttgagatatttagttttcctagctaggttttctttattttagtaccgaatctttaggtgtgccacgttaatttagacccattttttcatacttaccaactgagtctagtttaatcatgactataatcgtataaaatgattcagtcgacgtcattgcgaacgtatataaaatcatccaaattgacgtcattccaaagaggtaagcatgcttatctaagagtccgagcatactaaacaagacgacattttatttgcactccaaatcaaattttgtattgcctaaagaaaaacaatcaaactcaagtttcttaaaattaatttcattcaaactaatcactttcaatatctcacatattattcatgccatttctatttgtctaaacatgatttaaaaaaaaaagtaaaatacaaagattactatgcaaaaactctataaaaaaaaattcaaatttcttatttatttgtgacatcaaattttcaaaataatttttttaattatcggttgatccggtcagtcgataaaaacataaactttcagcgaccgttaaaactttcctactaccgatttagagaaaatcttagcttgaaacgtaattgtaacctgccttcatgcaagtcgcaagatatgtcatcctaagttgtatatgttttctcaaaagatgtatttacttgagaaaatacgtttcaacgttgatggacaaccaattaagaatcaagcacctttcgtaatcaatttaggcttatcgtctaaggtatactgatttacgacagttgactagacttataaggaacaaaataatagaatagtttctaaacacttcacctaatcatagagactaagatggtaattcgtaaacgacaaagcctagtgacactgtccattgtaaaattccacatcatattagtattaaacatatacatgtagtttcctgaacacatgtagtatcaaacacacttcgtggcttcttcctcgaaacctgcggccgctcattaattaagtcatctagttgaaggatcgctatcaactttgtatagaaaagttgggccgaattcgagctcggtacggccagaatggcccggaccgaagcttaccggtcgttgagaacaaatctggaaggccatccttgccttctgtcgtcgggcgcaccggacagtccggtgcacaccggacactgtccggtgcccgatttccttccttaaacatcgcagccgaccgttgccaaccgttgcagatctggcgcaccggacagtccggtgcacaccggacagtccggtgccactttccgaccgttggccagaccacgtgtcgcgcgcagatttcgcggccgaccgttggctcgggccgaccgttggctcaccggaaagtccggtgcacaccggacagtccggtgaattttagccgtacgccgtcggcaaattcccgagagcagcgtcttcaggtcgaggcagcctggcgcaccggacactgtccggtgcaccaccggagagtccggtgccccagaccgaagcagtcttttggctgtacacagccaactcttcttctttcttcttctctctgtttctattacttagacaagtatattagtacacaaaaccaatgtactaaggcttagaaacatacctttacttgtgatttgcactttgttcatccatgggcatagatttacatttaagcacttgtgttgacactcaatcaccaaaatacttagaaatggcccaaaggcacatttccctttcagtctttcatcgaacatcatggtcacgttcttcataccataaaaactagcattcccataaacatttgtctccacgcttcctccatggtatagtgtcactagggtgtccatctattgcaaacatggattactaactcaataatggctaaatactagtgcctcaatacttactaagtagtaaataaataataactgcttactatatagtaaatattaaatgaccacattaaccgaaattacataatctatgaataatgtacgaaaacaatgtatacatgagatcgcgtacgagtccagctaacggtggagaaggtcaagtcggaaggacacctatatacaaaaaatactattgtcaataaaaaatcggcagcacctcccctataaagtgatgtttctaaaacctacaaagaaataacaacacgatggttgccaacacagaaaactgctaccaacaagtatatgttaaaccctatataatcactcactttcctccatccattacactaacaatatgctaccgacttactaactatataatcactaactatatacacgaacaaataaatacctagctaactatttataataacaaatgaatagctaacagactatacattaaaccaagtaatcttgtgctacaaatttatttttcagacagaaaaatctatttagctaactaattaatacaaattaataccaagcaacgatagatgaacatctagttgtctaattagctaactaattaatacaaattaagtagaatccttaccgtggggagatggggcgcgacgaagtgctcgagcttggggcgcggcgaccggcgacgtgaagcttgggggcgcgggggccggacggcgctgcgggcggcatggcgggcggctgcgggcggcggcgcgggcgcaggaaacaaacgacgggagtgggaggaaggagaaagcggcgcgccggtttagtcctagctcggcgccaagatctgtggcgccgagctaggtgccacgatggccgccgcgtcagcaaagctcggcgccaaggcatgttgcgccgagccgtgttagctcggcgtcatagctcatggtgccgagttttgggtctaaaattgcgtttaagtattctagggatctaaacgcaaatatttttcgaaaatagggccgaaaaacaaaaaaaaatcggtcgtttcgtcgagcacatcgtccagcctatcttgcatgtccatcctctctatggttcgcgagccgcgcgcatggcgctccaaaggaggggcgaggttgaatatagacagatggaatgggtggttctctatttatagcgcatgcagtcgtcccctggcacacctatttatatgtgagcgttcctggcactagagagatcgatcgatcgagcttaattgcgccactgctcgttatcctcctcttgcattgcattgcaggtcgtagttgagcagcagcaaccactgcacaggcctaggcgcgccatttaaatatggcggtggcggcgccggcctcggacgccaagccgcgcctcaacgtgccaccgtccatggcatccgcgctccgcctcgatcccgtggggctgggggcgggaccctctatgccgtccccctcccgccgactcgccgagcctcccaagacgccctccccatccaagaccacctacagcgaccgtttcatcccctgccgctcctcctcccgcctccagaacttcgcgctaatcgactcccctctctccccagccaaggacgacacgccctactcccgcctcctccgcgccgagctctttggccccgattcacccaaacccaccaccgccacctccgcagcctccgcctcgcccaacaccaacctcttccgcttcaagaaagaccactccgctcccacctcacccttcgctaaagctgccgccgcgcaccatgactgcaccgcgggatccggagacgcgccgtcgccgcagaagccacccaggaaggtccccaaaacgccgcataaggtcctggacgcgccctccctgcaggacgacttctatctcaacctcgtcgactggtcctcgcagaacgtgctcgccgtcggcctcggcacctgcgtctacctctggtccgcgtccaatagcaaggtcaccaagctctgcgatttggggcctagggacagcgtatgcgccgtgcattggtcacgggaaggctcttatctttccattggcaccggccttggagatgtccagatttgggatagttctcgctgtaagcggattagaaatatgggaggtcaccaaacaaggactggggtattagcatggagctcatgcatcttgtcgtcgggtagcagggacaagaacatactgcagcatgacatccgtgtccccaatgactatatcagcaagttttctggtcatagatcagaggtttgtggactcgaatggtcgcatgacgaccgcgagcttgcctcaggcggaaatgacaaccagttattagtctggaaccaacgatcgcaacagccagttttgcggttgacagaacatacagctgctgttaaagcaatagcgtggtcaccacatcagcaaggactcctagcatcaggaggtggaacagctgatagatgcatcaggttttggaacacggctaacggaaatgttctgaactcaattgacacaggcagccaggtttgcaaccttgcctggtgcaaaaatgtgaatgagcttgtgagcacacatggatattcccaaaatcagatcatggtgtggaaatacccatccatgtcaaaggttgcaactctaactggacatacgatgcgtgtgctttacctcgcgtcgtcgcctgatggacagaccatagtaacaggggcaggtgacgaaactctacggttctggaacatatttccatcagttagaacacagactcctgtgcgtgatattgggctctcgtcattctcaagaagccacatccggtgaatttaaatgcccgggcgatcgctcgaggcgtacctagtggtaccacatggttaacctagacttgtccatcttctggattggccaacttaattaatgtatgaaataaaaggatgcacacatagtgacatgctaatcactataatgtgggcatcaaagttgtgtgttatgtgtaattactagttatctgaataaaagagaaagagatcatccatatttcttatcctaaatgaatgtcacgtgtctttataattctttgatgaaccagatgcatttcattaaccaaatccatatacatataaatattaatcatatataattaatatcaattgggttagcaaaacaaatctagtctaggtgtgttttgcgaatgcggccgccaccgcggtggagctcgaattccggtccgggcctagaaggccagcttcaagtttgtacaaaaaagcaggctccggccagaatggcccggaccgggttaccgaattcgagctcggtaccctgggatccgatatcgatgggccctggccgaagcttggtcacccggtccgggcctagaaggccgatctcccgggcacccagctttcttgtacaaagtggccgttaacggatcggccagaatggcccggaccgaagcttgcatgcctgcagtgcagcgtgacccggtcgtgcccctctctagagataatgagcattgcatgtctaagttataaaaaattaccacatattttttttgtcacacttgtttgaagtgcagtttatctatctttatacatatatttaaactttactctacgaataatataatctatagtactacaataatatcagtgttttagagaatcatataaatgaacagttagacatggtctaaaggacaattgagtattttgacaacaggactctacagttttatctttttagtgtgcatgtgttctcctttttttttgcaaatagcttcacctatataatacttcatccattttattagtacatccatttagggtttagggttaatggtttttatagactaatttttttagtacatctattttattctattttagcctctaaattaagaaaactaaaactctattttagtttttttatttaataatttagatataaaatagaataaaataaagtgactaaaaattaaacaaataccctttaagaaattaaaaaaactaaggaaacatttttcttgtttcgagtagataatgccagcctgttaaacgccgtcgacgagtctaacggacaccaaccagcgaaccagcagcgtcgcgtcgggccaagcgaagcagacggcacggcatctctgtcgctgcctctggacccctctcgagagttccgctccaccgttggacttgctccgctgtcggcatccagaaattgcgtggcggagcggcagacgtgagccggcacggcaggcggcctcctcctcctctcacggcaccggcagctacgggggattcctttcccaccgctccttcgctttcccttcctcgcccgccgtaataaatagacaccccctccacaccctctttccccaacctcgtgttgttcggagcgcacacacacacaaccagatctcccccaaatccacccgtcggcacctccgcttcaaggtacgccgctcgtcctcccccccccccctctctaccttctctagatcggcgttccggtccatgcatggttagggcccggtagttctacttctgttcatgtttgtgttagatccgtgtttgtgttagatccgtgctgctagcgttcgtacacggatgcgacctgtacgtcagacacgttctgattgctaacttgccagtgtttctctttggggaatcctgggatggctctagccgttccgcagacgggatcgatttcatgattttttttgtttcgttgcatagggtttggtttgcccttttcctttatttcaatatatgccgtgcacttgtttgtcgggtcatcttttcatgcttttttttgtcttggttgtgatgatgtggtctggttgggcggtcgttctagatcggagtagaattctgtttcaaactacctggtggatttattaattttggatctgtatgtgtgtgccatacatattcatagttacgaattgaagatgatggatggaaatatcgatctaggataggtatacatgttgatgcgggttttactgatgcatatacagagatgctttttgttcgcttggttgtgatgatgtggtgtggttgggcggtcgttcattcgttctagatcggagtagaatactgtttcaaactacctggtgtatttattaattttggaactgtatgtgtgtgtcatacatcttcatagttacgagtttaagatggatggaaatatcgatctaggataggtatacatgttgatgtgggttttactgatgcatatacatgatggcatatgcagcatctattcatatgctctaaccttgagtacctatctattataataaacaagtatgttttataattattttgatcttgatatacttggatgatggcatatgcagcagctatatgtggatttttttagccctgccttcatacgctatttatttgcttggtactgtttcttttgtcgatgctcaccctgttgtttggtgttacttctgcaggtcgactttaacttagcctaggatccatggcctcctccgagaacgtcatcaccgagttcatgcgcttcaaggtgcgcatggagggcaccgtgaacggccacgagttcgagatcgagggcgagggcgagggccgcccctacgagggccacaacaccgtgaagctgaaggtgaccaagggcggccccctgcccttcgcctgggacatcctgtccccccagttccagtacggctccaaggtgtacgtgaagcaccccgccgacatccccgactacaagaagctgtccttccccgagggcttcaagtgggagcgcgtgatgaacttcgaggacggcggcgtggcgaccgtgacccaggactcctccctgcaggacggctgcttcatctacaaggtgaagttcatcggcgtgaacttcccctccgacggccccgtgatgcagaagaagaccatgggctgggaggcctccaccgagcgcctgtacccccgcgacggcgtgctgaagggcgagacccacaaggccctgaagctgaaggacggcggccactacctggtggagttcaagtccatctacatggccaagaagcccgtgcagctgcccggctactactacgtggacgccaagctggacatcacctcccacaacgaggactacaccatcgtggagcagtacgagcgcaccgagggccgccaccacctgttcctgtagggtaccacatggttaacctagacttgtccatcttctggattggccaacttaattaatgtatgaaataaaaggatgcacacatagtgacatgctaatcactataatgtgggcatcaaagttgtgtgttatgtgtaattactagttatctgaataaaagagaaagagatcatccatatttcttatcctaaatgaatgtcacgtgtctttataattctttgatgaaccagatgcatttcattaaccaaatccatatacatataaatattaatcatatataattaatatcaattgggttagcaaaacaaatctagtctaggtgtgttttgcgaatgcggccgccaccgcggtggagctcgaattccggtccgggcctagaaggccagcttcggccgccccgggcaactttattatacaaagttgatagatcctcatgtcttcatcgtaagcttaaacaggccagaatggcctctggattcagcggcctagaaggccgaagtacttggtcttcctagtcgagtagatcacattcaagcttggtcacccggtccgtcaatattctgattccgatgacttcgtaggttcctagctcaagccgctcgtgtccaagcgtcacttacgattagctaatgattacggcatctaggaccgactagtggcgcgccgactagctagctaaggtaccgagctcgaattcattccgattaatcgtggcctcttgctcttcaggatgaagagctatgtttaaacgtgcaagcgctactagacaattcagtacattaaaaacgtccgcaatgtgttattaagttgtctaagcgtcaatttgtttacaccacaatatatcctgcca

SEQ ID NO: 40 - DNA, 28544 bp, Artificial Sequence
  RX000011
gtttacccgccaatatatcctgtcaaacactgatagtttaaactgaaggcgggaaacgacaatctgatcatgagcggagaattaagggagtcacgttatgacccccgccgatgacgcgggacaagccgttttacgtttggaactgacagaaccgcaacgttgaaggagccactcagcaagctggtacgattgtaatacgactcactatagggcgaattgagcgctgtttaaacgctcttcaactggaagagcggttacgctgtttaaacgctcttcaactggaagagcggttactaccggttcactagctagctgctaatcgagctagttaccctatgaggtgacatgaagcgctcacggttactatgacggttagcttcacgactgttggtggcagtagcgtacgacttagctatagttccggacttacccttaagcgatttaaatctgcggttaccgaattcgagctcggtaccctgggatctgcccttactttaacgcctctaaccaacacccctttatctttataaggaacaataaacagaatttgccccactgttctaaatcacctaataatatccccagctaaaaacaataaaggtttcctagaattaagacaagcatgactgttcctccaggagggtttggaacattgttgcagtcttgcagatacgggcgaagggtgagaaacagagcggagggctggaggtgacctcggtagtcgacgccggagttgagcttgacaacgacggggcggcccctgatggacttgaggaagtccgatggcgtcttcaccgtcccgccggcgcccgaggcgggcctgtcgctgccgccgccgccgctgctcatcttgcgcgctgtgcccccggcggtgtccctgtgttgcggatcgcgggtgggccaggtggatgcgagggcgacccgtttggactccggccggagccgccggatccctggtcggtgtcagtgccgtttactctgggccccacgtgtcagtaccgtctgtagatgacaacaacccgtcgtccacagtcatgtccaaaatatcctttcttcttttttttcgattcggatatctatcttccttttttttttccaaaaatcttcttgacgcaccagcgcgcacgtttgtggtaaacgccgacacgtcggtcccacgtcgatagaccccacccaccagtgagtagcgtgtacgtattcgggggtgacggacgtgtcgccgtcgtcttgctagtcccattcccatctgagccacacatctctgaacaaaaaaaaggagggaggcctccacgcacatccccctccgtgccacccgccccaaaccctcgcgccgcctccgagacagccgccgcaaccatggccaccgccgccgccgcgtctaccgcgctcactggcgccactaccgctgcgcccaaggcgaggcgccgggcgcacctcctggccacccgccgcgccctcgccgcgcccatcaggtgctcagcggcgtcacccgccatgccgatggctcccccggccaccccgctccggccgtggggccccaccgagccccgcaagggtgctgacatcctcgtcgagtccctcgagcgctgcggcgtccgcgacgtaagtttctgcttctacctttgatatatatataataattatcattaattagtagtaatataatatttcaaatatttttttcaaaataaaagaatgtagtatatagcaattgcttttctgtagtttataacttcgtatagcatacattatacgaagttatacttttctaatatatgaccaaaatttgttaccgaattcaggcgacccatcgctgctttgtctacatcatgttcttcatcatcctccccaggcgacgcgtgctgctgttcttattcagactaccgttcgagtgactgcatggcgtacatctttctgcatcgactttgtacggctacatcgaacatatacacgagatgtctcgtgtgaatagagtcactaatgccttaagcatcggttactccgtagggtacattctgttcttcttatttgtgcatatttttattgttgtttactgattatacgagtagttatacatacatgcacatacatatcatcacatatatcacaatatttttctaaattaaattaaaactaaaaatgactaaatttctaacaccaacgacattgtaatgttttctccaacaactttacctattctacattgttctatttcgaatttcactctataaacaacatagtctacaatggaaaacagtgctttgtacgactatatacgcgatgtgtggctacaacataagacaatatagtcgtttgaagattgaacctatatatcggtacggttaatccgtctatgtacgtgggcatgacgaacacccgtgataacgaaggattaacgtgcacaatcataaatccaaagtaggagcggtgcatgatgagaatcgctctcagtactcgacataatgaaccttacgaggtacaacaggcaggcaggcagggaccaggggccgcctttatttcaggctcgctggccccacgggcgtgctgcgtgcacgaagggcactaccccaacctctcaccgaaaaccgcgctggatcggcaaatcaaacgaggtggtgccccgtgcccactctccacgtccacggcaccatccctctgcagccgctcaccagccatgccgtgtcgcggaacggcacaaccacccccaacccactcacgaaaccccgtcccggccgtgcccgtgtcggtccgcgctcggcaacgaggcggcccgcgctgctgagtcccctggacacccgacaccctgtcggccctttgtttattcatcccgaaatctcatctgcccccacggccgactgcgctgcgccgcccggatatatatacccatcgttatcgatcgactggggactctatcagtgatagagtctagaggatcgctcaggaaggccgctgagatagaggcatggcggccaatgcgggcggcggtggagcgggaggaggcagcggcagcggcagcgtggctgcgccggcggtgtgccgccccagcggctcgcggtggacgccgacgccggagcagatcaggatgctgaaggagctctactacggctgcggcatccggtcgcccagctcggagcagatccagcgcatcaccgccatgctgcggcagcacggcaagatcgagggcaagaacgtcttctactggttccagaaccacaaggcccgcgagcgccagaagcgccgcctcaccagcctcgacgtcaacgtgcccgccgccggcgcggccgacgccaccaccagccaactcggcgtcctctcgctgtcgtcgccgccgccttcaggcgcggcgcctccctcgcccaccctcggcttctacgccgccggcaatggcggcggatcggctgtgctgctggacacgagttccgactggggcagcagcggcgctgccatggccaccgagacatgcttcctgcaggactacatgggcgtgacggacacgggcagctcgtcgcagtggccacgcttctcgtcgtcggacacgataatggcggcggccgcggcgcgggcggcgacgacgcgggcgcccgagacgctccctctcttcccgacctgcggcgacgacggcggcagcggtagcagcagctacttgccgttctggggtgccgcgtccacaactgccggcgccacttcttccgttgcgatccagcagcaacaccagctgcaggagcagtacagcttttacagcaacagcaacagcacccagctggccggcaccggcaaccaagacgtatcggcaacagcagcagcagccgccgccctggagctgagcctcagctcatggtgctccccttaccctgctgcagggagtatgtgagagcaacgcgagctgccactgctcttcactggtaccgttaacagatcattcgacaaagcagcattagtccgttgatcggtggaagaccactcgtcagtgttgagttgaatgtttgatcaataaaatacggcaatgctgtaagggttgttttttatgccattgataatacactgtactgttcagttgttgaactctatttcttagccatgccaagtgcttttcttattttgaataacattacagcaaaaagttgaaagacaaaaaaaaaaacccccgaacagagtgctttgggtcccaagcttctttagactgtgttcggcgttccccctaaatttctccccctatatctcactcacttgtcacatcagcgttctctttccccctatatctccacgctctacagcagttccacctatatcaaacctctataccccaccacaacaatattatatactttcatcttcaactaactcatgtaccttccaatttttttctactaataattatttacgtgcacagaaacttagcaaggagagagagagcggggtgacccaccttgctagttggatattacctcttctcttcaaagtatccttgaacgctcaccggttatcaaatctctacactatagctctgtagtcttgctagatagttagttctttagctctcggtgaccaagcttggcgcgatcaagcttatcgataccgtcgacctcgaagcttggtcacccggtccgggcctagaaggccagcttcaagtttgtacaaaaaagcaggctccggccagaatggcccggaccgggttaccgaattcttaccctagctccctgcggctgttacgcggtcccccatcaatcttctgttcttgcggttgtagcctgtgtaacagtgctagagtatgtatgataaataggttttaagtctgcttacatgacattttttattgtggaagagacatataaaaattagagagagtggttctcatgcaacggcggacggcccggtgctaaaagagcttcaagacaaaataatgaaacaggaagagagtagatttatctaagagccaactttattatatgaatgtgtttattgttggctttagatgatatggtaaggagttagagctaataatagataggctctattattattattattaattaaactcgctctaaggaggaaagtgggaggaagggacgaggacgaagactactggaagcatcgtgcatggatgatggatgtggtgtctcttaatgtaggtggccggaggatgtacgtgttaattgcgcgataagcactcagatccaaccgcaaactacctccacactgacacactgatagagagaaagagagacctccgacgactgccgccgcagatgagccacgtacgtatacgacgtctgccggccggctcaggctgccgccatcaccctgctcgaaagtcgcgttaggcggcgccagctacataggagtatctagtctagccagttagtatactactactgcgctgatgatgaattaactctgcatagatactgtacttgcctccctccaacacccaaccacctcctgctcggctcttaataacttggacacggatcgatgccatccaaggaagaacacgacgacgacgacggaacatccaccatgcaagcttgcatccatacgccgatacgcgtgcatccatccatccaccattatttccattttccaccgatcacacgtacacaggcctatttaaggagcgacatcccactgcaactctcctcaccactcatcaccagctagctctagcaaagcacttgccatctaccgaccgccgcattccaaacagcccgacgagctagcagagcggcaggcacctccctcctcaaggaacccatggccactgtgaacaactggctcgctttctccctctccccgcaggagctgccgccctcccagacgacggactccacactcatctcggccgccaccgccgaccatgtctccggcgatgtctgcttcaacatcccccaagattggagcatgaggggatcagagctttcggcgctcgtcgcggagccgaagctggaggacttcctcggcggcatctccttctccgagcagcatcacaaggccaactgcaacatgatacccagcactagcagcacagtttgctacgcgagctcaggtgctagcaccggctaccatcaccagctgtaccaccagcccaccagctcagcgctccacttcgcggactccgtaatggtggcttcctcggccggtgtccacgacggcggtgccatgctcagcgcggccgccgctaacggtgtcgctggcgctgccagtgccaacggcggcggcatcgggctgtccatgattaagaactggctgcggagccaaccggcgcccatgcagccgagggtggcggcggctgagggcgcgcaggggctctctttgtccatgaacatggcggggacgacccaaggcgctgctggcatgccacttctcgctggagagcgcgcacgggcgcccgagagtgtatcgacgtcagcacagggtggagccgtcgtcgtcacggcgccgaaggaggatagcggtggcagcggtgttgccggcgctctagtagccgtgagcacggacacgggtggcagcggcggcgcgtcggctgacaacacggcaaggaagacggtggacacgttcgggcagcgcacgtcgatttaccgtggcgtgacaaggcatagatggactgggagatatgaggcacatctttgggataacagttgcagaagggaagggcaaactcgtaagggtcgtcaagtctatttaggtggctatgataaagaggagaaagctgctagggcttatgatcttgctgctctgaagtactggggtgccacaacaacaacaaattttccagtgagtaactacgaaaaggagctcgaggacatgaagcacatgacaaggcaggagtttgtagcgtctctgagaaggaagagcagtggtttctccagaggtgcatccatttacaggggagtgactaggcatcaccaacatggaagatggcaagcacggattggacgagttgcagggaacaaggatctttacttgggcaccttcagcacccaggaggaggcagcggaggcgtacgacatcgcggcgatcaagttccgcggcctcaacgccgtcaccaacttcgacatgagccgctacgacgtgaagagcatcctggacagcagcgccctccccatcggcagcgccgccaagcgcctcaaggaggccgaggccgcagcgtccgcgcagcaccaccacgccggcgtggtgagctacgacgtcggccgcatcgcctcgcagctcggcgacggcggagccctggcggcggcgtacggcgcgcactaccacggcgccgcctggccgaccatcgcgttccagccgggcgccgccagcacaggcctgtaccacccgtacgcgcagcagccaatgcgcggcggcgggtggtgcaagcaggagcaggaccacgcggtgatcgcggccgcgcacagcctgcaggacctccaccacctgaacctgggcgcggccggcgcgcacgactttttctcggcagggcagcaggccgccgccgctgcgatgcacggcctgggtagcatcgacagtgcgtcgctcgagcacagcaccggctccaactccgtcgtctacaacggcggggtcggcgacagcaacggcgccagcgccgtcggcggcagtggcggtggctacatgatgccgatgagcgctgccggagcaaccactacatcggcaatggtgagccacgagcaggtgcatgcacgggcctacgacgaagccaagcaggctgctcagatggggtacgagagctacctggtgaacgcggagaacaatggtggcggaaggatgtctgcatgggggactgtcgtgtctgcagccgcggcggcagcagcaagcagcaacgacaacatggccgccgacgtcgggcatggcggcgcgcagctcttcagtgtctggaacgacacttaagcgtacctagtggtacctgacatcttatagtctgcaacctctcgtgtctgaattcctatctttatcaagtgttattgcttccacgactataggacagctttcgtcgaaagcttttgctcatgtgatctcgaaggattcatctagtctgatttttcgtgacttgtatcggttttattggattcatccaacatatatcaataaaaaatgagttgtgtttcctttcttcctagttcagttaaaattatttccctcctgcgcttgtgctgtaattgtctgtgtacctgttgtttgtgactgtgttagttcccttggatatgatttcgtatttgatatgtacatggagatagcttagcttcattattggagtatgaagttagtatgacatagtcactctcctggaaaattgacactgcaaaccatatttttattctgaaccacaaatcctagtcagtccgctggcatatgccgtccgtttgctgaatccagaacgtgggtttggagatgtacggctgagatgcctctatgcgaaggggatttcgtggtgaaacgagatgggagtagagcaacgcccgtggaagatgcttcaaacttccacacttttgagcaacgatcggcagtagtaaggtagacgatttcaagatcaaagcatatgaagataaacaacatcaacaacaaaatttgttggggttctatagagagaaacagagctacatacatacactgttttgtatctaccatctgagatgatgaaaagatgaaaaactaaagaatgccccggcgccaacgccaggacacgccgcgcgcgcgtcacccgagccatctcttgacccagccggcgctgtatatttacacacgttgcagcatcgatcaccacctgttcgatcgcgtcgccgtcaccgggatctgagtcgaaacctagacttgtccatcttctggattggccaacttaattaatgtatgaaataaaaggatgcacacatagtgacatgctaatcactataatgtgggcatcaaagttgtgtgttatgtgtaattactagttatctgaataaaagagaaagagatcatccatatttcttatcctaaatgaatgtcacgtgtctttataattctttgatgaaccagatgcatttcattaaccaaatccatatacatataaatattaatcatatataattaatatcaattgggttagcaaaacaaatctagtctaggtgtgttttgcgaatgcgaccttcttatgtgcttctagtctccaaatgtggttgatagttattttgctctaagatcaacagtaatgaagtataaatcatcgttgtggtgtgctactcggttaattgagcattaacacacacaaacatgacgaggatggtataatctccaaaaatgtgtactttgttaggtgggaccctatagccttgattaatgtgctatgttaggcatgcctggaaacgtgtgacgcatatgttttgtgaacctgttgatattatatgtgcttttatattaccatattttattaaaatactaatatttattactagtaagatataacattctatctagcttaaaaactaaccataaatattccataataactagatttaccaaactaatatactaaatatacataataaatacaaaattaacaagacaataatcaatatttatgagcttaatatatttagacattatggttggtcgacgataatcatgctaacttttcgtaattgcttgattgaaatatgcttagaataatgcctctttgttctacatggcaaatagggaccattatggtgtaacaccctgggaaccacaaacaccccgaaatgctactaaactacacaactaaccttcatatataaaatttcgacagcatctcctttgaaaatttgcatagacgtggaagcaacagagtataaacagatatcatgataagaaaacatactagacattaataatctgctagaaatgggaagaatcctaacttgacgactgcgtaactgactagagtcacacttagctgaccctagtcacttacaactgacttcgtgtcctagatcgatgggccctggccgaagcttggtcacccggtccgggcctagaaggccagcttcaagtttgtaccctggagcttgccgagtgccatccttggacactcgataaagtatattttattttttttattttgccaaccaaactttttgtggtatgttcctacactatgtagatctacatgtaccattttggcacaattacatatttacaaaaatgttttctataaatattagatttagttcgtttatttgaatttcttcggaaaattcacatttaaactgcaagtcactcgaaacatggaaaaccgtgcatgcaaaataaatgatatgcatgttatctagcacaagttacgaccgatttcagaagcagaccagaatcttcaagcaccatgctcactaaacatgaccgtgaacttgttatctagttgtttaaaaattgtataaaacacaaataaagtcagaaattaatgaaacttgtccacatgtcatgatatcatatatagaggttgtgataaaaatttgataatgtttcggtaaagttgtgacgtactatgtgtagaaacctaagtgacctacacataaaatcatagagtttcaatgtagttcactcgacaaagactttgtcaagtgtccgataaaaagtactcgacaaagaagccgttgtcgatgtactgttcgtcgagatctctttgtcgagtgtcacactaggcaaagtctttacggagtgtttttcaggctttgacactcggcaaagcgctcgattccagtagtgacagtaatttgcatcaaaaatagctgagagatttaggccccgtttcaatctcacgggataaagtttagcttcctgctaaactttagctatatgaattgaagtgctaaagtttagtttcaattaccaccattagctctcctgtttagattacaaatggctaaaagtagctaaaaaatagctgctaaagtttatctcgcgagattgaaacagggccttaaaatgagtcaactaatagaccaactaattattagctattagtcgttagcttctttaatctaagctaaaaccaactaatagcttatttgttgaattacaattagctcaacggaattctctgtttttctaaaaaaaaactgcccctctcttacagcaaattgtccgctgcccgtcgtccagatacaatgaacgtacctagtaggaactcttttacacgctcggtcgctcgccgcggatcggagtccccggaacacgacaccactgtggaacacgacaaagtctgctcagaggcggccacaccctggcgtgcaccgagccggagcccggataagcacggtaaggagagtacggcgggacgtggcgacccgtgtgtctgctgccacgcagccttcctccacgtagccgcgcggccgcgccacgtaccagggcccggcgctggtataaatgcgcgccacctccgctttagttctgcatacagccaacccaaggatgtccaacctgctcacggttcaccagaaccttccggctcttccagtggacgcgacgtccgatgaagtcaggaagaacctcatggacatgttccgcgacaggcaagcgttcagcgagcacacctggaagatgctgctctccgtctgccgctcctgggctgcatggtgcaagctgaacaacaggaagtggttccccgctgagcccgaggacgtgagggattaccttctgtacctgcaagcgcgaggtttgtttctgcttctacctttgatatatatataataattatcattaattagtagtaatataatatttcaaatatttttttcaaaataaaagaatgtagtatatagcaattgcttttctgtagtttataagtgtgtatattttaatttataacttttctaatatatgaccaaaacatggtgatgcctaggtctggcagtgaagaccatccagcaacaccttggacaactgaacatgcttcacaggcgctccggcctcccgcgccccagcgactcgaacgccgtgagcctcgtcatgcgccgcatcaggaaggaaaacgtcgatgccggcgaaagggcaaagcaggccctcgcgttcgagaggaccgatttcgaccaggtccgcagcctgatggagaacagcgacaggtgccaggacattaggaacctggcgttcctcggaattgcatacaacacgctcctcaggatcgcggaaattgcccgcattcgcgtgaaggacattagccgcaccgacggcggcaggatgcttatccacattggcaggaccaagacgctcgtttccaccgcaggcgtcgaaaaggccctcagcctcggagtgaccaagctcgtcgaacgctggatctccgtgtccggcgtcgcggacgacccaaacaactacctcttctgccgcgtccgcaagaacggggtggctgcccctagcgccaccagccaactcagcacgagggccttggaaggtattttcgaggccacccaccgcctgatctacggcgcgaaggatgacagcggtcaacgctacctcgcatggtccgggcactccgcccgcgttggagctgctagggacatggcccgcgccggtgtttccatccccgaaatcatgcaggcgggtggatggacgaacgtgaacattgtcatgaactacattcgcaaccttgacagcgagacgggcgcaatggttcgcctcctggaagatggtgactgagctagacccagctttcttgtacaaagtggccgttaacggatccagacttgtccatcttctggattggccaacttaattaatgtatgaaataaaaggatgcacacatagtgacatgctaatcactataatgtgggcatcaaagttgtgtgttatgtgtaattactagttatctgaataaaagagaaagagatcatccatatttcttatcctaaatgaatgtcacgtgtctttataattctttgatgaaccagatgcatttcattaaccaaatccatatacatataaatattaatcatatataattaatatcaattgggttagcaaaacaaatctagtctaggtgtgttttgcgaattgcggcaagctgttaccgaattcctgcccttaaggccaattgttcaagattcattcaacaattgaaacatctcccatgattaaatcagtataaggttgctatggtcttgcttgacaaagtttttttttgagggaatttcaactaaatttttgagtgaaactatcaaatactgattttaaaaaatttttataaaaggaagcgcagagataaaaggccatctatgctacaaaagtacccaaaaatgtaatcctaaagtatgaattgcattttttttttgtttggacgaaaggaaaggagtattaccacaagaatgatatcatcttcatatttagatcttttttgggtaaagcttgagattctctaaatatagagaaatcagaagaaaaaaaaaccgtgttttggtggttttgatttctagcctccacaataactttgacggcgtcgacaagtctaacggacaccaagcagcgaaccaccagcgccgagccaagcgaagcagacggccgagacgttgacaccttcggcgcggcatctctcgagagttccgctccggcgctccacctccaccgctggcggtttcttattccgttccgttccgcctcctgctctgctcctctccacaccacacggcacgaaaccgttacggcaccggcagcacccagcacgggagaggggattcctttcccaccgttccttccctttccgccccgccgctataaatagccagccccatccccagcttttttccccaatctcatctcctctctcctgttgttcggagcacacgcacaatccgatcgatccccaaatccccttcgtctctcctcgcgagcctcgtggatcccagcttcaaggtacggcgatcgatcatcccccctccttctctctaccttcttttctctagactacatcggatggcgatccatggttagggcctgctagtttcccttcctgttttgtcgatggctgcgaggcacaatagatctgatggcgttatgacggctaacttgtcatgttgttgcgatttatagtccctttaggagatcagtttaatttctcggatggttcgagatcggtggtccatggttagtaccctaagatccgcgctgttagggttcgtagatggaggcgacctgttctgattgttaacttgtcagtacctgggaaatcctgggatggttctagctcgtccgcagatgagatcgatttcatgatcctctgtatcttgtttcgttgcctaggttccgtctaatctatccgtggtatgatgtagatgttttgatcgtgctaactacgtcttgtaaagttaattgtcaggtcataatttttagcatgcctttttttttgtttggttttgtctaattgggctgtcgttctagatcagagtagaagactgttccaaactacctgctggatttattgaacttggatctgtatgtgtgtcacatatcttcataaattcatgattaagatggattgaaatatcttttatctttttggtatggatagttctatatgttggtgtggctttgttagatgtatacatgcttagatacatgaagcaacgtgctgctactgtttagtaattgctgttcatttgtctaataaacagataaggatatgtatttatgttgctgttggttttgctggtactttgttggatacaaatgcttcaatacagaaaacagcatgctgctacgatttaccatttatctaatcttatcatatgtctaatctaataaacaaacatgcttttaaattatcttcatatgcttggatgatggcatacacagcggctatgtgtggttttttaaatacccagcatcatgggcatgcatgacactgctttaatatgctttttatttgcttgagactgtttcttttgtttatactgaccctttagttcggtgactcttctgcaggtcgactttaacttagcctaggatccatggcccagtccaagcacggcctgaccaaggagatgaccatgaagtaccgcatggagggctgcgtggacggccacaagttcgtgatcaccggcgagggcatcggctaccccttcaagggcaagcaggccatcaacctgtgcgtggtggagggcggccccttgcccttcgccgaggacatcttgtccgccgccttcatgtacggcaaccgcgtgttcaccgagtacccccaggacatcgtcgactacttcaagaactcctgccccgccggctacacctgggaccgctccttcctgttcgaggacggcgccgtgtgcatctgcaacgccgacatcaccgtgagcgtggaggagaactgcatgtaccacgagtccaagttctacggcgtgaacttccccgccgacggccccgtgatgaagaagatgaccgacaactgggagccctcctgcgagaagatcatccccgtgcccaagcagggcatcttgaagggcgacgtgagcatgtacctgctgctgaaggacggtggccgcttgcgctgccagttcgacaccgtgtacaaggccaagtccgtgccccgcaagatgcccgactggcacttcatccagcacaagctgacccgcgaggaccgcagcgacgccaagaaccagaagtggcacctgaccgagcacgccatcgcctccggctccgccttgccctccggactcagatctcgatagggtaccaatggccagttaacagatccagctgctgctgttctagggttcacaagtctgcctatttgtcttccccaatggagctatggttgtctggtctggtccttggtcgtgtcccgtttcattgtgtactatttacctgtaatgtgtatccttaagtctggtttgatggtgtctgaaacgttttgctgtggtagagcagcatggaagaactataatgaataagtgatccctaatcattgtgtccaaattttgcttctgctatacccttttgtgctgtttcttatgttttgcttaaaaatttgatctgacaaacaaatttgtctaaattatgctcttgttctgactgtgtactgtacacatttgtattgctaccggtttggcacatagttttctctttgattgcagatcaaacccttctgattgcagattgcttggctatggctgatgtgctcactgttcttctttagcttgtatattgctgatggtggcttggctacggctgaaaaagttgctgctgcgccgacttggcaactgttgctccagtaatgctttgtcctctcttcctagccgccgacttggcacttggcagctgttgctcctgtaatgcgttgttatctcttatctcttgagatgtactatgattttgaggctgtttgacttgtgccagattgccagtgctgatgctatattatctcaggtttttatgctagtatatgttttactgtgtgctgcctgtgtcgagttacgtaatctattgaaccgctatgcgtgttgatgccctgttgttgcttgccagattgatgcccctgttgcttgcagcttgcaagctgtagtgaaatcctaaaattcgaaaccaaatctattctgaacttttgaagatctgtgatgtccggaagaaaagattcaaacagataaacgggactctccagaatctataaaataaatgatcgacaaacgctttgctttggtaggcttcctagttagttagcggaccgaagcttcggtccgggcctagaaggccagcttcggccgccccatttcaaatatttttttcaaaataaaagaatgtagtatatagcaattgcttttctgtagtttataacttcgtatagcatacattatacgaagttatacttttctaatatatgaccaaaatttgttgatgtgcaggtcttcgcctaccccggcggcgcgtccatggagatccaccaggcactcacccgctcccccgtcatcgccaaccacctcttccgccacgagcaaggggaggcctttgccgcctccggctacgcgcgctcctcgggccgcgtcggcgtctgcatcgccacctccggccccggcgccaccaacctagtctccgcgctcgccgacgcgctgctcgattccgtccccatggtcgccatcacgggacaggtggcgcgacgcatgattggcaccgacgccttccaggagacgcccatcgtcgaggtcacccgctccatcaccaagcacaactacctggtcctcgacgtcgacgacatcccccgcgtcgtgcaggaggctttcttcctcgcctcctctggtcgaccagggccggtgcttgtcgacatccccaaggacatccagcagcagatggcggtgcctgtctgggacaagcccatgagtctgcctgggtacattgcgcgccttcccaagccccctgcgactgagttgcttgagcaggtgctgcgtcttgttggtgaatcgcggcgccctgttctttatgtgggcggtggctgcgcagcatctggtgaggagttgcgacgctttgtggagctgactggaatcccggtcacaactactcttatgggcctcggcaacttccccagcgacgacccactgtctctgcgcatgctaggtatgcatgggacggtgtatgcaaattatgcagtggataaggccgatctgttgcttgcacttggtgtgcggtttgatgatcgcgtgacagggaagattgaggcttttgcaagcagggctaagattgtgcacgttgatattgatccggctgagattggcaagaacaagcagccacatgtgtccatctgtgcagatgttaagcttgctttgcagggcatgaatgctcttcttgaaggaagcacatcaaagaagagctttgactttggctcatggaacgatgagttggatcagcagaagagggaattcccccttgggtataaaacatctaatgaggagatccagccacaatatgctattcaggttcttgatgagctgacgaaaggcgaggccatcatcggcacaggtgttgggcagcaccagatgtgggcggcacagtactacacttacaagcggccaaggcagtggttgtcttcagctggtcttggggctatgggatttggtttgccggctgctgctggtgcttctgtggcaaacccaggtgtcactgttgttgacatcgatggagatggtagctttctcatgaacgttcaggagctagctatgatccgaattgagaacctcccagtgaaggtctttgtgctaaacaaccagcacctggggatggtggtgcagttggaggacaggttctataaggccaacagagcgcacacatacttgggaaacccagagaatgaaagtgagatatatccagatttcgtgacgatcgccaaagggttcaacattccagcggtccgtgtgacaaagaagaacgaagtccgcgcagcgataaagaagatgctcgagactccagggccgtacctcttggatataatcgtcccacaccaggagcatgtgttgcctatgatccctagtggtggggctttcaaggatatgatcctggatggtgatggcaggactgtgtactgatgactagctagtcagttaacagatctgccagatcctcggtgtacaaataacccgtcttatcctatgagacgggccggcgtcagtgtgttctggaggaatttttatgtcagagcctttttctttgtgtgcttgatgtagatgccaagggaagcttattggctgttgaagcttgatgcaaaataaattatggaactctgttttttgtttatctaataataactagcaaatatgcttccattgcattgaaactaacagccttttgtgtttccaagttttattttgtgacaatgtcatctatttcaattagttgtggaatcggaaacttgcaggactaacttggaaactccaatccctcagcatcctggactttttcctggtgtaatccatgtagatattattttaatcatcattttagttctggaggtttttccatctccggttttgctcccctttcttcaaaaaaaaaaaaaaaatgccgtaggcgccgcaacgcccacctgttgttcaaactcatgggcacgagtggctcgaagattttatacaacaattgctgtagtttcaccgttgctggtgaagaagcatttttttaaaaaaatatagtggtattcattttaattagtttagttgtgcagcgagcaaaatttggacatgctctgctcggaatctgatcgacctagacacagattagcagcagtagctttgtcatctgttccaagagttgcgatctgatagaagaaaaaaaaaccttcccttcaatgtaaaaccgaaactaacaagaaagaagcacagtgccgtttaggcaagtatggagtacgtattaagcatgtagaaggccatgcatgaaccactaacaagaaagaagcgcagtgccattcaggcaagcataagcatgtagattggcatgcatgaacaactaacagtagatcgtctctggtctgattagaagttttttgggaagccaagaaatcatgtacaactggttccatctcaaattccgtggcaaaaagaggcctaagcaacataaagctttccactggttgccatatatgatttgggcatttcactttgatcttaatgggccttgtaaagcccaagactcatgattatctttagttgatgctcttaattaggtgtgggcaaataattcaaactgtatgtacccgaccaaaaccaaagcaaaaataatcgaaccaaaccgaaaatttaaaaataaccgaatgaaaactaaatcctataactgaaagaactgaaaccgaatcaaaatatttaatgtaaccaaaaatatccgaaatataattatattgtcaaaaatattaataatttctagattaaataattaaaaatacttaaaaatttatataaaatagtaaaaatactcgaaaataaccacaaatattcaaaaacaaccgaaatatcccaaaatattcaaagcaaaataaccgaatggataccaaattttaaaaccgaaaaaactggaacaaaaccaaaatcgaaccaaaatttcaaaaatcgaataaatactaaactttagaacaaaaaaaaacgataaccgaatgtatacgaaccaaagccgaattagataaccgaacgtccaggactactcttaatctttccgccacttatgatttgggctattactttgtttataatgagccttttcaagctcaagttcatgattgtccgtgagatgagaaactgacttgttggattcgaaaccctagctagtattggttaatacttaatacataaatgacctgcattgacatcatcatccaagaaaataaaaattgtatgcttgagatatttagttttcctagctaggttttctttattttagtaccgaatctttaggtgtgccacgttaatttagacccattttttcatacttaccaactgagtctagtttaatcatgactataatcgtataaaatgattcagtcgacgtcattgcgaacgtatataaaatcatccaaattgacgtcattccaaagaggtaagcatgcttatctaagagtccgagcatactaaacaagacgacattttatttgcactccaaatcaaattttgtattgcctaaagaaaaacaatcaaactcaagtttcttaaaattaatttcattcaaactaatcactttcaatatctcacatattattcatgccatttctatttgtctaaacatgatttaaaaaaaaaagtaaaatacaaagattactatgcaaaaactctataaaaaaaaattcaaatttcttatttatttgtgacatcaaattttcaaaataatttttttaattatcggttgatccggtcagtcgataaaaacataaactttcagcgaccgttaaaactttcctactaccgatttagagaaaatcttagcttgaaacgtaattgtaacctgccttcatgcaagtcgcaagatatgtcatcctaagttgtatatgttttctcaaaagatgtatttacttgagaaaatacgtttcaacgttgatggacaaccaattaagaatcaagcacctttcgtaatcaatttaggcttatcgtctaaggtatactgatttacgacagttgactagacttataaggaacaaaataatagaatagtttctaaacacttcacctaatcatagagactaagatggtaattcgtaaacgacaaagcctagtgacactgtccattgtaaaattccacatcatattagtattaaacatatacatgtagtttcctgaacacatgtagtatcaaacacacttcgtggcttcttcctcgaaacctgcggccgctcattaattaagtcatctagttgaaggatcgctatcaactttgtatagaaaagttgggccgaattcgagctcggtacggccagaatggcccggaccgaagcttaccggtcgttgagaacaaatctggaaggccatccttgccttctgtcgtcgggcgcaccggacagtccggtgcacaccggacactgtccggtgcccgatttccttccttaaacatcgcagccgaccgttgccaaccgttgcagatctggcgcaccggacagtccggtgcacaccggacagtccggtgccactttccgaccgttggccagaccacgtgtcgcgcgcagatttcgcggccgaccgttggctcgggccgaccgttggctcaccggaaagtccggtgcacaccggacagtccggtgaattttagccgtacgccgtcggcaaattcccgagagcagcgtcttcaggtcgaggcagcctggcgcaccggacactgtccggtgcaccaccggagagtccggtgccccagaccgaagcagtcttttggctgtacacagccaactcttcttctttcttcttctctctgtttctattacttagacaagtatattagtacacaaaaccaatgtactaaggcttagaaacatacctttacttgtgatttgcactttgttcatccatgggcatagatttacatttaagcacttgtgttgacactcaatcaccaaaatacttagaaatggcccaaaggcacatttccctttcagtctttcatcgaacatcatggtcacgttcttcataccataaaaactagcattcccataaacatttgtctccacgcttcctccatggtatagtgtcactagggtgtccatctattgcaaacatggattactaactcaataatggctaaatactagtgcctcaatacttactaagtagtaaataaataataactgcttactatatagtaaatattaaatgaccacattaaccgaaattacataatctatgaataatgtacgaaaacaatgtatacatgagatcgcgtacgagtccagctaacggtggagaaggtcaagtcggaaggacacctatatacaaaaaatactattgtcaataaaaaatcggcagcacctcccctataaagtgatgtttctaaaacctacaaagaaataacaacacgatggttgccaacacagaaaactgctaccaacaagtatatgttaaaccctatataatcactcactttcctccatccattacactaacaatatgctaccgacttactaactatataatcactaactatatacacgaacaaataaatacctagctaactatttataataacaaatgaatagctaacagactatacattaaaccaagtaatcttgtgctacaaatttatttttcagacagaaaaatctatttagctaactaattaatacaaattaataccaagcaacgatagatgaacatctagttgtctaattagctaactaattaatacaaattaagtagaatccttaccgtggggagatggggcgcgacgaagtgctcgagcttggggcgcggcgaccggcgacgtgaagcttgggggcgcgggggccggacggcgctgcgggcggcatggcgggcggctgcgggcggcggcgcgggcgcaggaaacaaacgacgggagtgggaggaaggagaaagcggcgcgccggtttagtcctagctcggcgccaagatctgtggcgccgagctaggtgccacgatggccgccgcgtcagcaaagctcggcgccaaggcatgttgcgccgagccgtgttagctcggcgtcatagctcatggtgccgagttttgggtctaaaattgcgtttaagtattctagggatctaaacgcaaatatttttcgaaaatagggccgaaaaacaaaaaaaaatcggtcgtttcgtcgagcacatcgtccagcctatcttgcatgtccatcctctctatggttcgcgagccgcgcgcatggcgctccaaaggaggggcgaggttgaatatagacagatggaatgggtggttctctatttatagcgcatgcagtcgtcccctggcacacctatttatatgtgagcgttcctggcactagagagatcgatcgatcgagcttaattgcgccactgctcgttatcctcctcttgcattgcattgcaggtcgtagttgagcagcagcaaccactgcacaggcctaggcgcgccatttaaatatgcgcgaaattctgcatattcagggcggccagtgcggcaaccagattggcagcaaattttgggaagtggtgtgcgatgaacatggcattgatccgaccggccgctatatgggcaccagcgatgtgcagctggaacgcgtgaacgtgtattataacgaagcgagctgcggccgctttgtgccgcgcgcggtgctgatggatctggaaccgggcaccatggatgcggtgcgcaccggcccgtatggccagatttttcgcccggataactttgtgtttggccagagcggcgcgggcaacaactgggcgaaaggccattataccgaaggcgcggaactgattgatagcgtgctggatgtggtgcgcaaagaagcggaaaactgcgattgcctgcagggctttcaggtgtgccatagcctgcacgctggacaccgggaggcaatgcgcgaaattctgcatattcagggcggccagtgcggcaaccagattggcagcaaattttgggaagtggtgtgcgatgaacatggcattgatccgaccggccgctatatgggcaccagcgatgtgcagctggaacgcgtgaacgtgtattataacgaagcgagctgcggccgctttgtgccgcgcgcggtgctgatggatctggaaccgggcaccatggatgcggtgcgcaccggcccgtatggccagatttttcgcccggataactttgtgtttggccagagcggcgcgggcaacaactgggcgaaaggccattataccgaaggcgcggaactgattgatagcgtgctggatgtggtgcgcaaagaagcggaaaactgcgattgcctgcagggctttcaggtgtgccatagcctgatttaaatgcccgggcgatcgctcgaggcgtacctagtggtaccacatggttaacctagacttgtccatcttctggattggccaacttaattaatgtatgaaataaaaggatgcacacatagtgacatgctaatcactataatgtgggcatcaaagttgtgtgttatgtgtaattactagttatctgaataaaagagaaagagatcatccatatttcttatcctaaatgaatgtcacgtgtctttataattctttgatgaaccagatgcatttcattaaccaaatccatatacatataaatattaatcatatataattaatatcaattgggttagcaaaacaaatctagtctaggtgtgttttgcgaatgcggccgccaccgcggtggagctcgaattccggtccgggcctagaaggccagcttcaagtttgtacaaaaaagcaggctccggccagaatggcccggaccgggttaccgaattcgagctcggtaccctgggatccgatatcgatgggccctggccgaagcttggtcacccggtccgggcctagaaggccgatctcccgggcacccagctttcttgtacaaagtggccgttaacggatcggccagaatggcccggaccgaagcttgcatgcctgcagtgcagcgtgacccggtcgtgcccctctctagagataatgagcattgcatgtctaagttataaaaaattaccacatattttttttgtcacacttgtttgaagtgcagtttatctatctttatacatatatttaaactttactctacgaataatataatctatagtactacaataatatcagtgttttagagaatcatataaatgaacagttagacatggtctaaaggacaattgagtattttgacaacaggactctacagttttatctttttagtgtgcatgtgttctcctttttttttgcaaatagcttcacctatataatacttcatccattttattagtacatccatttagggtttagggttaatggtttttatagactaatttttttagtacatctattttattctattttagcctctaaattaagaaaactaaaactctattttagtttttttatttaataatttagatataaaatagaataaaataaagtgactaaaaattaaacaaataccctttaagaaattaaaaaaactaaggaaacatttttcttgtttcgagtagataatgccagcctgttaaacgccgtcgacgagtctaacggacaccaaccagcgaaccagcagcgtcgcgtcgggccaagcgaagcagacggcacggcatctctgtcgctgcctctggacccctctcgagagttccgctccaccgttggacttgctccgctgtcggcatccagaaattgcgtggcggagcggcagacgtgagccggcacggcaggcggcctcctcctcctctcacggcaccggcagctacgggggattcctttcccaccgctccttcgctttcccttcctcgcccgccgtaataaatagacaccccctccacaccctctttccccaacctcgtgttgttcggagcgcacacacacacaaccagatctcccccaaatccacccgtcggcacctccgcttcaaggtacgccgctcgtcctcccccccccccctctctaccttctctagatcggcgttccggtccatgcatggttagggcccggtagttctacttctgttcatgtttgtgttagatccgtgtttgtgttagatccgtgctgctagcgttcgtacacggatgcgacctgtacgtcagacacgttctgattgctaacttgccagtgtttctctttggggaatcctgggatggctctagccgttccgcagacgggatcgatttcatgattttttttgtttcgttgcatagggtttggtttgcccttttcctttatttcaatatatgccgtgcacttgtttgtcgggtcatcttttcatgcttttttttgtcttggttgtgatgatgtggtctggttgggcggtcgttctagatcggagtagaattctgtttcaaactacctggtggatttattaattttggatctgtatgtgtgtgccatacatattcatagttacgaattgaagatgatggatggaaatatcgatctaggataggtatacatgttgatgcgggttttactgatgcatatacagagatgctttttgttcgcttggttgtgatgatgtggtgtggttgggcggtcgttcattcgttctagatcggagtagaatactgtttcaaactacctggtgtatttattaattttggaactgtatgtgtgtgtcatacatcttcatagttacgagtttaagatggatggaaatatcgatctaggataggtatacatgttgatgtgggttttactgatgcatatacatgatggcatatgcagcatctattcatatgctctaaccttgagtacctatctattataataaacaagtatgttttataattattttgatcttgatatacttggatgatggcatatgcagcagctatatgtggatttttttagccctgccttcatacgctatttatttgcttggtactgtttcttttgtcgatgctcaccctgttgtttggtgttacttctgcaggtcgactttaacttagcctaggatccatggcctcctccgagaacgtcatcaccgagttcatgcgcttcaaggtgcgcatggagggcaccgtgaacggccacgagttcgagatcgagggcgagggcgagggccgcccctacgagggccacaacaccgtgaagctgaaggtgaccaagggcggccccctgcccttcgcctgggacatcctgtccccccagttccagtacggctccaaggtgtacgtgaagcaccccgccgacatccccgactacaagaagctgtccttccccgagggcttcaagtgggagcgcgtgatgaacttcgaggacggcggcgtggcgaccgtgacccaggactcctccctgcaggacggctgcttcatctacaaggtgaagttcatcggcgtgaacttcccctccgacggccccgtgatgcagaagaagaccatgggctgggaggcctccaccgagcgcctgtacccccgcgacggcgtgctgaagggcgagacccacaaggccctgaagctgaaggacggcggccactacctggtggagttcaagtccatctacatggccaagaagcccgtgcagctgcccggctactactacgtggacgccaagctggacatcacctcccacaacgaggactacaccatcgtggagcagtacgagcgcaccgagggccgccaccacctgttcctgtagggtaccacatggttaacctagacttgtccatcttctggattggccaacttaattaatgtatgaaataaaaggatgcacacatagtgacatgctaatcactataatgtgggcatcaaagttgtgtgttatgtgtaattactagttatctgaataaaagagaaagagatcatccatatttcttatcctaaatgaatgtcacgtgtctttataattctttgatgaaccagatgcatttcattaaccaaatccatatacatataaatattaatcatatataattaatatcaattgggttagcaaaacaaatctagtctaggtgtgttttgcgaatgcggccgccaccgcggtggagctcgaattccggtccgggcctagaaggccagcttcggccgccccgggcaactttattatacaaagttgatagatcctcatgtcttcatcgtaagcttaaacaggccagaatggcctctggattcagcggcctagaaggccgaagtacttggtcttcctagtcgagtagatcacattcaagcttggtcacccggtccgtcaatattctgattccgatgacttcgtaggttcctagctcaagccgctcgtgtccaagcgtcacttacgattagctaatgattacggcatctaggaccgactagtggcgcgccgactagctagctaaggtaccgagctcgaattcattccgattaatcgtggcctcttgctcttcaggatgaagagctatgtttaaacgtgcaagcgctactagacaattcagtacattaaaaacgtccgcaatgtgttattaagttgtctaagcgtcaatttgtttacaccacaatatatcctgcca

SEQ ID NO: 41 - DNA, 28799 bp, Artificial Sequence
  RV042025
gtttacccgccaatatatcctgtcaaacactgatagtttaaactgaaggcgggaaacgacaatctgatcatgagcggagaattaagggagtcacgttatgacccccgccgatgacgcgggacaagccgttttacgtttggaactgacagaaccgcaacgttgaaggagccactcagcaagctggtacgattgtaatacgactcactatagggcgaattgagcgctgtttaaacgctcttcaactggaagagcggttacgctgtttaaacgctcttcaactggaagagcggttactaccggttcactagctagctgctaatcgagctagttaccctatgaggtgacatgaagcgctcacggttactatgacggttagcttcacgactgttggtggcagtagcgtacgacttagctatagttccggacttacccttaagcgatttaaatctgcggttaccgaattcgagctcggtaccctgggatctgcccttactttaacgcctctaaccaacacccctttatctttataaggaacaataaacagaatttgccccactgttctaaatcacctaataatatccccagctaaaaacaataaaggtttcctagaattaagacaagcatgactgttcctccaggagggtttggaacattgttgcagtcttgcagatacgggcgaagggtgagaaacagagcggagggctggaggtgacctcggtagtcgacgccggagttgagcttgacaacgacggggcggcccctgatggacttgaggaagtccgatggcgtcttcaccgtcccgccggcgcccgaggcgggcctgtcgctgccgccgccgccgctgctcatcttgcgcgctgtgcccccggcggtgtccctgtgttgcggatcgcgggtgggccaggtggatgcgagggcgacccgtttggactccggccggagccgccggatccctggtcggtgtcagtgccgtttactctgggccccacgtgtcagtaccgtctgtagatgacaacaacccgtcgtccacagtcatgtccaaaatatcctttcttcttttttttcgattcggatatctatcttccttttttttttccaaaaatcttcttgacgcaccagcgcgcacgtttgtggtaaacgccgacacgtcggtcccacgtcgatagaccccacccaccagtgagtagcgtgtacgtattcgggggtgacggacgtgtcgccgtcgtcttgctagtcccattcccatctgagccacacatctctgaacaaaaaaaaggagggaggcctccacgcacatccccctccgtgccacccgccccaaaccctcgcgccgcctccgagacagccgccgcaaccatggccaccgccgccgccgcgtctaccgcgctcactggcgccactaccgctgcgcccaaggcgaggcgccgggcgcacctcctggccacccgccgcgccctcgccgcgcccatcaggtgctcagcggcgtcacccgccatgccgatggctcccccggccaccccgctccggccgtggggccccaccgagccccgcaagggtgctgacatcctcgtcgagtccctcgagcgctgcggcgtccgcgacgtaagtttctgcttctacctttgatatatatataataattatcattaattagtagtaatataatatttcaaatatttttttcaaaataaaagaatgtagtatatagcaattgcttttctgtagtttataacttcgtatagcatacattatacgaagttatacttttctaatatatgaccaaaatttgttaccgaattcaggcgacccatcgctgctttgtctacatcatgttcttcatcatcctccccaggcgacgcgtgctgctgttcttattcagactaccgttcgagtgactgcatggcgtacatctttctgcatcgactttgtacggctacatcgaacatatacacgagatgtctcgtgtgaatagagtcactaatgccttaagcatcggttactccgtagggtacattctgttcttcttatttgtgcatatttttattgttgtttactgattatacgagtagttatacatacatgcacatacatatcatcacatatatcacaatatttttctaaattaaattaaaactaaaaatgactaaatttctaacaccaacgacattgtaatgttttctccaacaactttacctattctacattgttctatttcgaatttcactctataaacaacatagtctacaatggaaaacagtgctttgtacgactatatacgcgatgtgtggctacaacataagacaatatagtcgtttgaagattgaacctatatatcggtacggttaatccgtctatgtacgtgggcatgacgaacacccgtgataacgaaggattaacgtgcacaatcataaatccaaagtaggagcggtgcatgatgagaatcgctctcagtactcgacataatgaaccttacgaggtacaacaggcaggcaggcagggaccaggggccgcctttatttcaggctcgctggccccacgggcgtgctgcgtgcacgaagggcactaccccaacctctcaccgaaaaccgcgctggatcggcaaatcaaacgaggtggtgccccgtgcccactctccacgtccacggcaccatccctctgcagccgctcaccagccatgccgtgtcgcggaacggcacaaccacccccaacccactcacgaaaccccgtcccggccgtgcccgtgtcggtccgcgctcggcaacgaggcggcccgcgctgctgagtcccctggacacccgacaccctgtcggccctttgtttattcatcccgaaatctcatctgcccccacggccgactgcgctgcgccgcccggatatatatacccatcgttatcgatcgactggggactctatcagtgatagagtctagaggatcgctcaggaaggccgctgagatagaggcatggcggccaatgcgggcggcggtggagcgggaggaggcagcggcagcggcagcgtggctgcgccggcggtgtgccgccccagcggctcgcggtggacgccgacgccggagcagatcaggatgctgaaggagctctactacggctgcggcatccggtcgcccagctcggagcagatccagcgcatcaccgccatgctgcggcagcacggcaagatcgagggcaagaacgtcttctactggttccagaaccacaaggcccgcgagcgccagaagcgccgcctcaccagcctcgacgtcaacgtgcccgccgccggcgcggccgacgccaccaccagccaactcggcgtcctctcgctgtcgtcgccgccgccttcaggcgcggcgcctccctcgcccaccctcggcttctacgccgccggcaatggcggcggatcggctgtgctgctggacacgagttccgactggggcagcagcggcgctgccatggccaccgagacatgcttcctgcaggactacatgggcgtgacggacacgggcagctcgtcgcagtggccacgcttctcgtcgtcggacacgataatggcggcggccgcggcgcgggcggcgacgacgcgggcgcccgagacgctccctctcttcccgacctgcggcgacgacggcggcagcggtagcagcagctacttgccgttctggggtgccgcgtccacaactgccggcgccacttcttccgttgcgatccagcagcaacaccagctgcaggagcagtacagcttttacagcaacagcaacagcacccagctggccggcaccggcaaccaagacgtatcggcaacagcagcagcagccgccgccctggagctgagcctcagctcatggtgctccccttaccctgctgcagggagtatgtgagagcaacgcgagctgccactgctcttcactggtaccgttaacagatcattcgacaaagcagcattagtccgttgatcggtggaagaccactcgtcagtgttgagttgaatgtttgatcaataaaatacggcaatgctgtaagggttgttttttatgccattgataatacactgtactgttcagttgttgaactctatttcttagccatgccaagtgcttttcttattttgaataacattacagcaaaaagttgaaagacaaaaaaaaaaacccccgaacagagtgctttgggtcccaagcttctttagactgtgttcggcgttccccctaaatttctccccctatatctcactcacttgtcacatcagcgttctctttccccctatatctccacgctctacagcagttccacctatatcaaacctctataccccaccacaacaatattatatactttcatcttcaactaactcatgtaccttccaatttttttctactaataattatttacgtgcacagaaacttagcaaggagagagagagcggggtgacccaccttgctagttggatattacctcttctcttcaaagtatccttgaacgctcaccggttatcaaatctctacactatagctctgtagtcttgctagatagttagttctttagctctcggtgaccaagcttggcgcgatcaagcttatcgataccgtcgacctcgaagcttggtcacccggtccgggcctagaaggccagcttcaagtttgtacaaaaaagcaggctccggccagaatggcccggaccgggttaccgaattcttaccctagctccctgcggctgttacgcggtcccccatcaatcttctgttcttgcggttgtagcctgtgtaacagtgctagagtatgtatgataaataggttttaagtctgcttacatgacattttttattgtggaagagacatataaaaattagagagagtggttctcatgcaacggcggacggcccggtgctaaaagagcttcaagacaaaataatgaaacaggaagagagtagatttatctaagagccaactttattatatgaatgtgtttattgttggctttagatgatatggtaaggagttagagctaataatagataggctctattattattattattaattaaactcgctctaaggaggaaagtgggaggaagggacgaggacgaagactactggaagcatcgtgcatggatgatggatgtggtgtctcttaatgtaggtggccggaggatgtacgtgttaattgcgcgataagcactcagatccaaccgcaaactacctccacactgacacactgatagagagaaagagagacctccgacgactgccgccgcagatgagccacgtacgtatacgacgtctgccggccggctcaggctgccgccatcaccctgctcgaaagtcgcgttaggcggcgccagctacataggagtatctagtctagccagttagtatactactactgcgctgatgatgaattaactctgcatagatactgtacttgcctccctccaacacccaaccacctcctgctcggctcttaataacttggacacggatcgatgccatccaaggaagaacacgacgacgacgacggaacatccaccatgcaagcttgcatccatacgccgatacgcgtgcatccatccatccaccattatttccattttccaccgatcacacgtacacaggcctatttaaggagcgacatcccactgcaactctcctcaccactcatcaccagctagctctagcaaagcacttgccatctaccgaccgccgcattccaaacagcccgacgagctagcagagcggcaggcacctccctcctcaaggaacccatggccactgtgaacaactggctcgctttctccctctccccgcaggagctgccgccctcccagacgacggactccacactcatctcggccgccaccgccgaccatgtctccggcgatgtctgcttcaacatcccccaagattggagcatgaggggatcagagctttcggcgctcgtcgcggagccgaagctggaggacttcctcggcggcatctccttctccgagcagcatcacaaggccaactgcaacatgatacccagcactagcagcacagtttgctacgcgagctcaggtgctagcaccggctaccatcaccagctgtaccaccagcccaccagctcagcgctccacttcgcggactccgtaatggtggcttcctcggccggtgtccacgacggcggtgccatgctcagcgcggccgccgctaacggtgtcgctggcgctgccagtgccaacggcggcggcatcgggctgtccatgattaagaactggctgcggagccaaccggcgcccatgcagccgagggtggcggcggctgagggcgcgcaggggctctctttgtccatgaacatggcggggacgacccaaggcgctgctggcatgccacttctcgctggagagcgcgcacgggcgcccgagagtgtatcgacgtcagcacagggtggagccgtcgtcgtcacggcgccgaaggaggatagcggtggcagcggtgttgccggcgctctagtagccgtgagcacggacacgggtggcagcggcggcgcgtcggctgacaacacggcaaggaagacggtggacacgttcgggcagcgcacgtcgatttaccgtggcgtgacaaggcatagatggactgggagatatgaggcacatctttgggataacagttgcagaagggaagggcaaactcgtaagggtcgtcaagtctatttaggtggctatgataaagaggagaaagctgctagggcttatgatcttgctgctctgaagtactggggtgccacaacaacaacaaattttccagtgagtaactacgaaaaggagctcgaggacatgaagcacatgacaaggcaggagtttgtagcgtctctgagaaggaagagcagtggtttctccagaggtgcatccatttacaggggagtgactaggcatcaccaacatggaagatggcaagcacggattggacgagttgcagggaacaaggatctttacttgggcaccttcagcacccaggaggaggcagcggaggcgtacgacatcgcggcgatcaagttccgcggcctcaacgccgtcaccaacttcgacatgagccgctacgacgtgaagagcatcctggacagcagcgccctccccatcggcagcgccgccaagcgcctcaaggaggccgaggccgcagcgtccgcgcagcaccaccacgccggcgtggtgagctacgacgtcggccgcatcgcctcgcagctcggcgacggcggagccctggcggcggcgtacggcgcgcactaccacggcgccgcctggccgaccatcgcgttccagccgggcgccgccagcacaggcctgtaccacccgtacgcgcagcagccaatgcgcggcggcgggtggtgcaagcaggagcaggaccacgcggtgatcgcggccgcgcacagcctgcaggacctccaccacctgaacctgggcgcggccggcgcgcacgactttttctcggcagggcagcaggccgccgccgctgcgatgcacggcctgggtagcatcgacagtgcgtcgctcgagcacagcaccggctccaactccgtcgtctacaacggcggggtcggcgacagcaacggcgccagcgccgtcggcggcagtggcggtggctacatgatgccgatgagcgctgccggagcaaccactacatcggcaatggtgagccacgagcaggtgcatgcacgggcctacgacgaagccaagcaggctgctcagatggggtacgagagctacctggtgaacgcggagaacaatggtggcggaaggatgtctgcatgggggactgtcgtgtctgcagccgcggcggcagcagcaagcagcaacgacaacatggccgccgacgtcgggcatggcggcgcgcagctcttcagtgtctggaacgacacttaagcgtacctagtggtacctgacatcttatagtctgcaacctctcgtgtctgaattcctatctttatcaagtgttattgcttccacgactataggacagctttcgtcgaaagcttttgctcatgtgatctcgaaggattcatctagtctgatttttcgtgacttgtatcggttttattggattcatccaacatatatcaataaaaaatgagttgtgtttcctttcttcctagttcagttaaaattatttccctcctgcgcttgtgctgtaattgtctgtgtacctgttgtttgtgactgtgttagttcccttggatatgatttcgtatttgatatgtacatggagatagcttagcttcattattggagtatgaagttagtatgacatagtcactctcctggaaaattgacactgcaaaccatatttttattctgaaccacaaatcctagtcagtccgctggcatatgccgtccgtttgctgaatccagaacgtgggtttggagatgtacggctgagatgcctctatgcgaaggggatttcgtggtgaaacgagatgggagtagagcaacgcccgtggaagatgcttcaaacttccacacttttgagcaacgatcggcagtagtaaggtagacgatttcaagatcaaagcatatgaagataaacaacatcaacaacaaaatttgttggggttctatagagagaaacagagctacatacatacactgttttgtatctaccatctgagatgatgaaaagatgaaaaactaaagaatgccccggcgccaacgccaggacacgccgcgcgcgcgtcacccgagccatctcttgacccagccggcgctgtatatttacacacgttgcagcatcgatcaccacctgttcgatcgcgtcgccgtcaccgggatctgagtcgaaacctagacttgtccatcttctggattggccaacttaattaatgtatgaaataaaaggatgcacacatagtgacatgctaatcactataatgtgggcatcaaagttgtgtgttatgtgtaattactagttatctgaataaaagagaaagagatcatccatatttcttatcctaaatgaatgtcacgtgtctttataattctttgatgaaccagatgcatttcattaaccaaatccatatacatataaatattaatcatatataattaatatcaattgggttagcaaaacaaatctagtctaggtgtgttttgcgaatgcgaccttcttatgtgcttctagtctccaaatgtggttgatagttattttgctctaagatcaacagtaatgaagtataaatcatcgttgtggtgtgctactcggttaattgagcattaacacacacaaacatgacgaggatggtataatctccaaaaatgtgtactttgttaggtgggaccctatagccttgattaatgtgctatgttaggcatgcctggaaacgtgtgacgcatatgttttgtgaacctgttgatattatatgtgcttttatattaccatattttattaaaatactaatatttattactagtaagatataacattctatctagcttaaaaactaaccataaatattccataataactagatttaccaaactaatatactaaatatacataataaatacaaaattaacaagacaataatcaatatttatgagcttaatatatttagacattatggttggtcgacgataatcatgctaacttttcgtaattgcttgattgaaatatgcttagaataatgcctctttgttctacatggcaaatagggaccattatggtgtaacaccctgggaaccacaaacaccccgaaatgctactaaactacacaactaaccttcatatataaaatttcgacagcatctcctttgaaaatttgcatagacgtggaagcaacagagtataaacagatatcatgataagaaaacatactagacattaataatctgctagaaatgggaagaatcctaacttgacgactgcgtaactgactagagtcacacttagctgaccctagtcacttacaactgacttcgtgtcctagatcgatgggccctggccgaagcttggtcacccggtccgggcctagaaggccagcttcaagtttgtaccctggagcttgccgagtgccatccttggacactcgataaagtatattttattttttttattttgccaaccaaactttttgtggtatgttcctacactatgtagatctacatgtaccattttggcacaattacatatttacaaaaatgttttctataaatattagatttagttcgtttatttgaatttcttcggaaaattcacatttaaactgcaagtcactcgaaacatggaaaaccgtgcatgcaaaataaatgatatgcatgttatctagcacaagttacgaccgatttcagaagcagaccagaatcttcaagcaccatgctcactaaacatgaccgtgaacttgttatctagttgtttaaaaattgtataaaacacaaataaagtcagaaattaatgaaacttgtccacatgtcatgatatcatatatagaggttgtgataaaaatttgataatgtttcggtaaagttgtgacgtactatgtgtagaaacctaagtgacctacacataaaatcatagagtttcaatgtagttcactcgacaaagactttgtcaagtgtccgataaaaagtactcgacaaagaagccgttgtcgatgtactgttcgtcgagatctctttgtcgagtgtcacactaggcaaagtctttacggagtgtttttcaggctttgacactcggcaaagcgctcgattccagtagtgacagtaatttgcatcaaaaatagctgagagatttaggccccgtttcaatctcacgggataaagtttagcttcctgctaaactttagctatatgaattgaagtgctaaagtttagtttcaattaccaccattagctctcctgtttagattacaaatggctaaaagtagctaaaaaatagctgctaaagtttatctcgcgagattgaaacagggccttaaaatgagtcaactaatagaccaactaattattagctattagtcgttagcttctttaatctaagctaaaaccaactaatagcttatttgttgaattacaattagctcaacggaattctctgtttttctaaaaaaaaactgcccctctcttacagcaaattgtccgctgcccgtcgtccagatacaatgaacgtacctagtaggaactcttttacacgctcggtcgctcgccgcggatcggagtccccggaacacgacaccactgtggaacacgacaaagtctgctcagaggcggccacaccctggcgtgcaccgagccggagcccggataagcacggtaaggagagtacggcgggacgtggcgacccgtgtgtctgctgccacgcagccttcctccacgtagccgcgcggccgcgccacgtaccagggcccggcgctggtataaatgcgcgccacctccgctttagttctgcatacagccaacccaaggatgtccaacctgctcacggttcaccagaaccttccggctcttccagtggacgcgacgtccgatgaagtcaggaagaacctcatggacatgttccgcgacaggcaagcgttcagcgagcacacctggaagatgctgctctccgtctgccgctcctgggctgcatggtgcaagctgaacaacaggaagtggttccccgctgagcccgaggacgtgagggattaccttctgtacctgcaagcgcgaggtttgtttctgcttctacctttgatatatatataataattatcattaattagtagtaatataatatttcaaatatttttttcaaaataaaagaatgtagtatatagcaattgcttttctgtagtttataagtgtgtatattttaatttataacttttctaatatatgaccaaaacatggtgatgcctaggtctggcagtgaagaccatccagcaacaccttggacaactgaacatgcttcacaggcgctccggcctcccgcgccccagcgactcgaacgccgtgagcctcgtcatgcgccgcatcaggaaggaaaacgtcgatgccggcgaaagggcaaagcaggccctcgcgttcgagaggaccgatttcgaccaggtccgcagcctgatggagaacagcgacaggtgccaggacattaggaacctggcgttcctcggaattgcatacaacacgctcctcaggatcgcggaaattgcccgcattcgcgtgaaggacattagccgcaccgacggcggcaggatgcttatccacattggcaggaccaagacgctcgtttccaccgcaggcgtcgaaaaggccctcagcctcggagtgaccaagctcgtcgaacgctggatctccgtgtccggcgtcgcggacgacccaaacaactacctcttctgccgcgtccgcaagaacggggtggctgcccctagcgccaccagccaactcagcacgagggccttggaaggtattttcgaggccacccaccgcctgatctacggcgcgaaggatgacagcggtcaacgctacctcgcatggtccgggcactccgcccgcgttggagctgctagggacatggcccgcgccggtgtttccatccccgaaatcatgcaggcgggtggatggacgaacgtgaacattgtcatgaactacattcgcaaccttgacagcgagacgggcgcaatggttcgcctcctggaagatggtgactgagctagacccagctttcttgtacaaagtggccgttaacggatccagacttgtccatcttctggattggccaacttaattaatgtatgaaataaaaggatgcacacatagtgacatgctaatcactataatgtgggcatcaaagttgtgtgttatgtgtaattactagttatctgaataaaagagaaagagatcatccatatttcttatcctaaatgaatgtcacgtgtctttataattctttgatgaaccagatgcatttcattaaccaaatccatatacatataaatattaatcatatataattaatatcaattgggttagcaaaacaaatctagtctaggtgtgttttgcgaattgcggcaagctgttaccgaattcctgcccttaaggccaattgttcaagattcattcaacaattgaaacatctcccatgattaaatcagtataaggttgctatggtcttgcttgacaaagtttttttttgagggaatttcaactaaatttttgagtgaaactatcaaatactgattttaaaaaatttttataaaaggaagcgcagagataaaaggccatctatgctacaaaagtacccaaaaatgtaatcctaaagtatgaattgcattttttttttgtttggacgaaaggaaaggagtattaccacaagaatgatatcatcttcatatttagatcttttttgggtaaagcttgagattctctaaatatagagaaatcagaagaaaaaaaaaccgtgttttggtggttttgatttctagcctccacaataactttgacggcgtcgacaagtctaacggacaccaagcagcgaaccaccagcgccgagccaagcgaagcagacggccgagacgttgacaccttcggcgcggcatctctcgagagttccgctccggcgctccacctccaccgctggcggtttcttattccgttccgttccgcctcctgctctgctcctctccacaccacacggcacgaaaccgttacggcaccggcagcacccagcacgggagaggggattcctttcccaccgttccttccctttccgccccgccgctataaatagccagccccatccccagcttttttccccaatctcatctcctctctcctgttgttcggagcacacgcacaatccgatcgatccccaaatccccttcgtctctcctcgcgagcctcgtggatcccagcttcaaggtacggcgatcgatcatcccccctccttctctctaccttcttttctctagactacatcggatggcgatccatggttagggcctgctagtttcccttcctgttttgtcgatggctgcgaggcacaatagatctgatggcgttatgacggctaacttgtcatgttgttgcgatttatagtccctttaggagatcagtttaatttctcggatggttcgagatcggtggtccatggttagtaccctaagatccgcgctgttagggttcgtagatggaggcgacctgttctgattgttaacttgtcagtacctgggaaatcctgggatggttctagctcgtccgcagatgagatcgatttcatgatcctctgtatcttgtttcgttgcctaggttccgtctaatctatccgtggtatgatgtagatgttttgatcgtgctaactacgtcttgtaaagttaattgtcaggtcataatttttagcatgcctttttttttgtttggttttgtctaattgggctgtcgttctagatcagagtagaagactgttccaaactacctgctggatttattgaacttggatctgtatgtgtgtcacatatcttcataaattcatgattaagatggattgaaatatcttttatctttttggtatggatagttctatatgttggtgtggctttgttagatgtatacatgcttagatacatgaagcaacgtgctgctactgtttagtaattgctgttcatttgtctaataaacagataaggatatgtatttatgttgctgttggttttgctggtactttgttggatacaaatgcttcaatacagaaaacagcatgctgctacgatttaccatttatctaatcttatcatatgtctaatctaataaacaaacatgcttttaaattatcttcatatgcttggatgatggcatacacagcggctatgtgtggttttttaaatacccagcatcatgggcatgcatgacactgctttaatatgctttttatttgcttgagactgtttcttttgtttatactgaccctttagttcggtgactcttctgcaggtcgactttaacttagcctaggatccatggcccagtccaagcacggcctgaccaaggagatgaccatgaagtaccgcatggagggctgcgtggacggccacaagttcgtgatcaccggcgagggcatcggctaccccttcaagggcaagcaggccatcaacctgtgcgtggtggagggcggccccttgcccttcgccgaggacatcttgtccgccgccttcatgtacggcaaccgcgtgttcaccgagtacccccaggacatcgtcgactacttcaagaactcctgccccgccggctacacctgggaccgctccttcctgttcgaggacggcgccgtgtgcatctgcaacgccgacatcaccgtgagcgtggaggagaactgcatgtaccacgagtccaagttctacggcgtgaacttccccgccgacggccccgtgatgaagaagatgaccgacaactgggagccctcctgcgagaagatcatccccgtgcccaagcagggcatcttgaagggcgacgtgagcatgtacctgctgctgaaggacggtggccgcttgcgctgccagttcgacaccgtgtacaaggccaagtccgtgccccgcaagatgcccgactggcacttcatccagcacaagctgacccgcgaggaccgcagcgacgccaagaaccagaagtggcacctgaccgagcacgccatcgcctccggctccgccttgccctccggactcagatctcgatagggtaccaatggccagttaacagatccagctgctgctgttctagggttcacaagtctgcctatttgtcttccccaatggagctatggttgtctggtctggtccttggtcgtgtcccgtttcattgtgtactatttacctgtaatgtgtatccttaagtctggtttgatggtgtctgaaacgttttgctgtggtagagcagcatggaagaactataatgaataagtgatccctaatcattgtgtccaaattttgcttctgctatacccttttgtgctgtttcttatgttttgcttaaaaatttgatctgacaaacaaatttgtctaaattatgctcttgttctgactgtgtactgtacacatttgtattgctaccggtttggcacatagttttctctttgattgcagatcaaacccttctgattgcagattgcttggctatggctgatgtgctcactgttcttctttagcttgtatattgctgatggtggcttggctacggctgaaaaagttgctgctgcgccgacttggcaactgttgctccagtaatgctttgtcctctcttcctagccgccgacttggcacttggcagctgttgctcctgtaatgcgttgttatctcttatctcttgagatgtactatgattttgaggctgtttgacttgtgccagattgccagtgctgatgctatattatctcaggtttttatgctagtatatgttttactgtgtgctgcctgtgtcgagttacgtaatctattgaaccgctatgcgtgttgatgccctgttgttgcttgccagattgatgcccctgttgcttgcagcttgcaagctgtagtgaaatcctaaaattcgaaaccaaatctattctgaacttttgaagatctgtgatgtccggaagaaaagattcaaacagataaacgggactctccagaatctataaaataaatgatcgacaaacgctttgctttggtaggcttcctagttagttagcggaccgaagcttcggtccgggcctagaaggccagcttcggccgccccatttcaaatatttttttcaaaataaaagaatgtagtatatagcaattgcttttctgtagtttataacttcgtatagcatacattatacgaagttatacttttctaatatatgaccaaaatttgttgatgtgcaggtcttcgcctaccccggcggcgcgtccatggagatccaccaggcactcacccgctcccccgtcatcgccaaccacctcttccgccacgagcaaggggaggcctttgccgcctccggctacgcgcgctcctcgggccgcgtcggcgtctgcatcgccacctccggccccggcgccaccaacctagtctccgcgctcgccgacgcgctgctcgattccgtccccatggtcgccatcacgggacaggtggcgcgacgcatgattggcaccgacgccttccaggagacgcccatcgtcgaggtcacccgctccatcaccaagcacaactacctggtcctcgacgtcgacgacatcccccgcgtcgtgcaggaggctttcttcctcgcctcctctggtcgaccagggccggtgcttgtcgacatccccaaggacatccagcagcagatggcggtgcctgtctgggacaagcccatgagtctgcctgggtacattgcgcgccttcccaagccccctgcgactgagttgcttgagcaggtgctgcgtcttgttggtgaatcgcggcgccctgttctttatgtgggcggtggctgcgcagcatctggtgaggagttgcgacgctttgtggagctgactggaatcccggtcacaactactcttatgggcctcggcaacttccccagcgacgacccactgtctctgcgcatgctaggtatgcatgggacggtgtatgcaaattatgcagtggataaggccgatctgttgcttgcacttggtgtgcggtttgatgatcgcgtgacagggaagattgaggcttttgcaagcagggctaagattgtgcacgttgatattgatccggctgagattggcaagaacaagcagccacatgtgtccatctgtgcagatgttaagcttgctttgcagggcatgaatgctcttcttgaaggaagcacatcaaagaagagctttgactttggctcatggaacgatgagttggatcagcagaagagggaattcccccttgggtataaaacatctaatgaggagatccagccacaatatgctattcaggttcttgatgagctgacgaaaggcgaggccatcatcggcacaggtgttgggcagcaccagatgtgggcggcacagtactacacttacaagcggccaaggcagtggttgtcttcagctggtcttggggctatgggatttggtttgccggctgctgctggtgcttctgtggcaaacccaggtgtcactgttgttgacatcgatggagatggtagctttctcatgaacgttcaggagctagctatgatccgaattgagaacctcccagtgaaggtctttgtgctaaacaaccagcacctggggatggtggtgcagttggaggacaggttctataaggccaacagagcgcacacatacttgggaaacccagagaatgaaagtgagatatatccagatttcgtgacgatcgccaaagggttcaacattccagcggtccgtgtgacaaagaagaacgaagtccgcgcagcgataaagaagatgctcgagactccagggccgtacctcttggatataatcgtcccacaccaggagcatgtgttgcctatgatccctagtggtggggctttcaaggatatgatcctggatggtgatggcaggactgtgtactgatgactagctagtcagttaacagatctgccagatcctcggtgtacaaataacccgtcttatcctatgagacgggccggcgtcagtgtgttctggaggaatttttatgtcagagcctttttctttgtgtgcttgatgtagatgccaagggaagcttattggctgttgaagcttgatgcaaaataaattatggaactctgttttttgtttatctaataataactagcaaatatgcttccattgcattgaaactaacagccttttgtgtttccaagttttattttgtgacaatgtcatctatttcaattagttgtggaatcggaaacttgcaggactaacttggaaactccaatccctcagcatcctggactttttcctggtgtaatccatgtagatattattttaatcatcattttagttctggaggtttttccatctccggttttgctcccctttcttcaaaaaaaaaaaaaaaatgccgtaggcgccgcaacgcccacctgttgttcaaactcatgggcacgagtggctcgaagattttatacaacaattgctgtagtttcaccgttgctggtgaagaagcatttttttaaaaaaatatagtggtattcattttaattagtttagttgtgcagcgagcaaaatttggacatgctctgctcggaatctgatcgacctagacacagattagcagcagtagctttgtcatctgttccaagagttgcgatctgatagaagaaaaaaaaaccttcccttcaatgtaaaaccgaaactaacaagaaagaagcacagtgccgtttaggcaagtatggagtacgtattaagcatgtagaaggccatgcatgaaccactaacaagaaagaagcgcagtgccattcaggcaagcataagcatgtagattggcatgcatgaacaactaacagtagatcgtctctggtctgattagaagttttttgggaagccaagaaatcatgtacaactggttccatctcaaattccgtggcaaaaagaggcctaagcaacataaagctttccactggttgccatatatgatttgggcatttcactttgatcttaatgggccttgtaaagcccaagactcatgattatctttagttgatgctcttaattaggtgtgggcaaataattcaaactgtatgtacccgaccaaaaccaaagcaaaaataatcgaaccaaaccgaaaatttaaaaataaccgaatgaaaactaaatcctataactgaaagaactgaaaccgaatcaaaatatttaatgtaaccaaaaatatccgaaatataattatattgtcaaaaatattaataatttctagattaaataattaaaaatacttaaaaatttatataaaatagtaaaaatactcgaaaataaccacaaatattcaaaaacaaccgaaatatcccaaaatattcaaagcaaaataaccgaatggataccaaattttaaaaccgaaaaaactggaacaaaaccaaaatcgaaccaaaatttcaaaaatcgaataaatactaaactttagaacaaaaaaaaacgataaccgaatgtatacgaaccaaagccgaattagataaccgaacgtccaggactactcttaatctttccgccacttatgatttgggctattactttgtttataatgagccttttcaagctcaagttcatgattgtccgtgagatgagaaactgacttgttggattcgaaaccctagctagtattggttaatacttaatacataaatgacctgcattgacatcatcatccaagaaaataaaaattgtatgcttgagatatttagttttcctagctaggttttctttattttagtaccgaatctttaggtgtgccacgttaatttagacccattttttcatacttaccaactgagtctagtttaatcatgactataatcgtataaaatgattcagtcgacgtcattgcgaacgtatataaaatcatccaaattgacgtcattccaaagaggtaagcatgcttatctaagagtccgagcatactaaacaagacgacattttatttgcactccaaatcaaattttgtattgcctaaagaaaaacaatcaaactcaagtttcttaaaattaatttcattcaaactaatcactttcaatatctcacatattattcatgccatttctatttgtctaaacatgatttaaaaaaaaaagtaaaatacaaagattactatgcaaaaactctataaaaaaaaattcaaatttcttatttatttgtgacatcaaattttcaaaataatttttttaattatcggttgatccggtcagtcgataaaaacataaactttcagcgaccgttaaaactttcctactaccgatttagagaaaatcttagcttgaaacgtaattgtaacctgccttcatgcaagtcgcaagatatgtcatcctaagttgtatatgttttctcaaaagatgtatttacttgagaaaatacgtttcaacgttgatggacaaccaattaagaatcaagcacctttcgtaatcaatttaggcttatcgtctaaggtatactgatttacgacagttgactagacttataaggaacaaaataatagaatagtttctaaacacttcacctaatcatagagactaagatggtaattcgtaaacgacaaagcctagtgacactgtccattgtaaaattccacatcatattagtattaaacatatacatgtagtttcctgaacacatgtagtatcaaacacacttcgtggcttcttcctcgaaacctgcggccgctcattaattaagtcatctagttgaaggatcgctatcaactttgtatagaaaagttgggccgaattcgagctcggtacggccagaatggcccggaccgaagcttaccggtcaaccaatcaggatttctttgtagggtcgagagaaggaggaagtactctccatgccatgcacgccacagtattgaatgtttttggcatggtcatactagccgtgtgtctctgttccatttggccagccagctccaattatttggcatgatcatcctgtcatactagcagtagcagcgtcatcttcgccgctggccgccccctgcaggctgcagtgtcacacatgcctaatcctgcagtcctgccttttgccttccaaaccgtgtgagccttccgtgcgctcgtcaagtttatgggctgtatttttccgagaggagcctaatgggccaaaagcaaggccttttgggccaatcacgatgggccttaggacactttctaaggcaagaacatgaacctttttctttttctcatattgtcatctgcgtattgtttcatgaagttgctatgcaacgtcacctgaagttgtaaccaactccacgtcacctgaagttgtaaccaactccacgcatataatattggtcctattttgcagagcgtaggttctgttggatctacctgatcaatagttagcggctagtgtaaataaaatagatcctatgatccatctaagtttgaattttcatgtttaataatcagtatgtgactatttaaactaatcttatttgctaatgttttttcgatatagtttaaaggctgtagaatatacttgaacttaggcaaagtggtgaccgagatgatcaacacatcaatcaagacgttagaagccttgatgaaacattcacgagagacgagcaaggagtctaagacgctaagataaataaaacctagaccaaggcatgtggagaaataaagtcaaacaaatgctactcgacaacatccagcttgtccagtactgcaccagaccagcccagagacaaaaagttcaaaagcatgtaaaaagaacgcaacggtaacacaccagatgtgtccggtgctatgccctatgacataaccaacgccacaatgtgcacgatgtgctctagaatgtgaggccagacgcatccggtggcacaacgaacactttactcatctagggttatagagtggattgcaacatgacttggagatgacgacaacttaccgaacgtcacatttgacgacagatctccaatggccaataactgctggaaagccaatagatacgtcacatggacgcaccaaacgtgtttggtgtctatgtaaaatttgttgtgtatccccacgaccacatttacattgggggctatatatacccccttgctagccaaatagagggtggtagagtatgttgaaattgtaggagagtgtcaagacacttcatcaagtgctctaaccacacaaaaaacacttaacaaaagattagatgagcagcatagtgatttttgtgaattgcttatgctagttaaacacatttatttacccttgttgtaggttagggcctagtgtttagtgttgtttgcatagcgctcttaccactcatacactatttttgtacaccaggggcctgaagtcttacaccaatcgtgtttatggtgtgttcgtcaccgtgtgctaaaggaaacgaagcccacaaggaccgattcaggagaagccattttagagacacacttatgtgtagtcaagtcacatgatctattcatagagttattcgacctagagcttgacccttgtacgggaatttatgcgatgagctttaatgaggactaagaaagctaagatacaattaaacttattccgaaaccgacaattaaagacacttcttgggacggagggagtagctgacgttccgtaatgcatgcaagagaagtgaggagggccacgctagagaagagaagtacagaacggaatgagggacggtggcgcatgtccccgcaagatcctgagctgattctaaatcaagcatttgcttgaccaagtctatgcggcgcagagcccgcccgcgccctatgcttgctccggagctctcgttcgttccctgccgcggcagccatcgatcaccggccccaacgctagctttagcttcgcctatttacatacccgagcggagaagagaagagaagagaagcgatcgggattgtgggcgagtgcgtgcgttcgtgcagccacagacaggcgtccgggcacccctaggcgcgccatttaaatatggcgcccagcagctacgaggtggcggcttccatcctcctctgcgccgaggacagcagcagcatcctggacctcgaagcggaggccgaggaggaagcgctactggcgcggagcggggagcccggcggcggcgcggagttccccgtgccgtccgaggaatgcgtcgccggtttcctggagtctgaggcagcgcacatgccgcgggaggactacgccgagaggctgcgcagcggggggatggatctccgcgtccggacggacgccatcgactggatttggaaggttcacacgtgctacggtttcggccctctcactgcctgcttggccgtcaactacctggaccgcttcctctcgctctaccagcttccggaaggcaaggcttggatgacacagctgctgtccgtggcgtgcttgtccctggccgccaagatggaggagacctacgtcccttcgtccctggacctgcaggccggggacgcgcggtacgtgttcgaggcgaagacgatccagaggatggagctcctggtcctcagcacgctcaagtggaggatgcaagcggtcacccccttgtcgtacgtcgactacttcctccaccggctccgaggcggcgccgcgccgagcagacgcgccgtcctccgatccgcggagctcatcctgtgcatcgccagagggacgcactgcttggatttcaggccctcggagatcgccttggccgtcgccgccaccgtggccggcgaagagcgcgccgtggacatcgacagggccttcacccaccgtgtacataaggagagggtgtcgcgatgcctcgaagcgatccagcaggccaccgccaccatggccctgccgcagccgctgaaaagtgaaggcccgagcagcagcggccgcagggcctcgtcttcctcggccaccgtgccgcggagccccaccggggtgctggacgctggctgcctgagctacaggagagccgccgccgccgccgcctcgcacgcgagctccagctggcgcgacgaggacgacgacgactgccccccggctgtctgcagcaagaggaggaagattagcagatgaatttaaatgcccgggcgatcgctcgaggcgtacctagtggtaccacatggttaacctagacttgtccatcttctggattggccaacttaattaatgtatgaaataaaaggatgcacacatagtgacatgctaatcactataatgtgggcatcaaagttgtgtgttatgtgtaattactagttatctgaataaaagagaaagagatcatccatatttcttatcctaaatgaatgtcacgtgtctttataattctttgatgaaccagatgcatttcattaaccaaatccatatacatataaatattaatcatatataattaatatcaattgggttagcaaaacaaatctagtctaggtgtgttttgcgaatgcggccgccaccgcggtggagctcgaattccggtccgggcctagaaggccagcttcaagtttgtacaaaaaagcaggctccggccagaatggcccggaccgggttaccgaattcgagctcggtaccctgggatccgatatcgatgggccctggccgaagcttggtcacccggtccgggcctagaaggccgatctcccgggcacccagctttcttgtacaaagtggccgttaacggatcggccagaatggcccggaccgaagcttgcatgcctgcagtgcagcgtgacccggtcgtgcccctctctagagataatgagcattgcatgtctaagttataaaaaattaccacatattttttttgtcacacttgtttgaagtgcagtttatctatctttatacatatatttaaactttactctacgaataatataatctatagtactacaataatatcagtgttttagagaatcatataaatgaacagttagacatggtctaaaggacaattgagtattttgacaacaggactctacagttttatctttttagtgtgcatgtgttctcctttttttttgcaaatagcttcacctatataatacttcatccattttattagtacatccatttagggtttagggttaatggtttttatagactaatttttttagtacatctattttattctattttagcctctaaattaagaaaactaaaactctattttagtttttttatttaataatttagatataaaatagaataaaataaagtgactaaaaattaaacaaataccctttaagaaattaaaaaaactaaggaaacatttttcttgtttcgagtagataatgccagcctgttaaacgccgtcgacgagtctaacggacaccaaccagcgaaccagcagcgtcgcgtcgggccaagcgaagcagacggcacggcatctctgtcgctgcctctggacccctctcgagagttccgctccaccgttggacttgctccgctgtcggcatccagaaattgcgtggcggagcggcagacgtgagccggcacggcaggcggcctcctcctcctctcacggcaccggcagctacgggggattcctttcccaccgctccttcgctttcccttcctcgcccgccgtaataaatagacaccccctccacaccctctttccccaacctcgtgttgttcggagcgcacacacacacaaccagatctcccccaaatccacccgtcggcacctccgcttcaaggtacgccgctcgtcctcccccccccccctctctaccttctctagatcggcgttccggtccatgcatggttagggcccggtagttctacttctgttcatgtttgtgttagatccgtgtttgtgttagatccgtgctgctagcgttcgtacacggatgcgacctgtacgtcagacacgttctgattgctaacttgccagtgtttctctttggggaatcctgggatggctctagccgttccgcagacgggatcgatttcatgattttttttgtttcgttgcatagggtttggtttgcccttttcctttatttcaatatatgccgtgcacttgtttgtcgggtcatcttttcatgcttttttttgtcttggttgtgatgatgtggtctggttgggcggtcgttctagatcggagtagaattctgtttcaaactacctggtggatttattaattttggatctgtatgtgtgtgccatacatattcatagttacgaattgaagatgatggatggaaatatcgatctaggataggtatacatgttgatgcgggttttactgatgcatatacagagatgctttttgttcgcttggttgtgatgatgtggtgtggttgggcggtcgttcattcgttctagatcggagtagaatactgtttcaaactacctggtgtatttattaattttggaactgtatgtgtgtgtcatacatcttcatagttacgagtttaagatggatggaaatatcgatctaggataggtatacatgttgatgtgggttttactgatgcatatacatgatggcatatgcagcatctattcatatgctctaaccttgagtacctatctattataataaacaagtatgttttataattattttgatcttgatatacttggatgatggcatatgcagcagctatatgtggatttttttagccctgccttcatacgctatttatttgcttggtactgtttcttttgtcgatgctcaccctgttgtttggtgttacttctgcaggtcgactttaacttagcctaggatccatggcctcctccgagaacgtcatcaccgagttcatgcgcttcaaggtgcgcatggagggcaccgtgaacggccacgagttcgagatcgagggcgagggcgagggccgcccctacgagggccacaacaccgtgaagctgaaggtgaccaagggcggccccctgcccttcgcctgggacatcctgtccccccagttccagtacggctccaaggtgtacgtgaagcaccccgccgacatccccgactacaagaagctgtccttccccgagggcttcaagtgggagcgcgtgatgaacttcgaggacggcggcgtggcgaccgtgacccaggactcctccctgcaggacggctgcttcatctacaaggtgaagttcatcggcgtgaacttcccctccgacggccccgtgatgcagaagaagaccatgggctgggaggcctccaccgagcgcctgtacccccgcgacggcgtgctgaagggcgagacccacaaggccctgaagctgaaggacggcggccactacctggtggagttcaagtccatctacatggccaagaagcccgtgcagctgcccggctactactacgtggacgccaagctggacatcacctcccacaacgaggactacaccatcgtggagcagtacgagcgcaccgagggccgccaccacctgttcctgtagggtaccacatggttaacctagacttgtccatcttctggattggccaacttaattaatgtatgaaataaaaggatgcacacatagtgacatgctaatcactataatgtgggcatcaaagttgtgtgttatgtgtaattactagttatctgaataaaagagaaagagatcatccatatttcttatcctaaatgaatgtcacgtgtctttataattctttgatgaaccagatgcatttcattaaccaaatccatatacatataaatattaatcatatataattaatatcaattgggttagcaaaacaaatctagtctaggtgtgttttgcgaatgcggccgccaccgcggtggagctcgaattccggtccgggcctagaaggccagcttcggccgccccgggcaactttattatacaaagttgatagatcctcatgtcttcatcgtaagcttaaacaggccagaatggcctctggattcagcggcctagaaggccgaagtacttggtcttcctagtcgagtagatcacattcaagcttggtcacccggtccgtcaatattctgattccgatgacttcgtaggttcctagctcaagccgctcgtgtccaagcgtcacttacgattagctaatgattacggcatctaggaccgactagtggcgcgccgactagctagctaaggtaccgagctcgaattcattccgattaatcgtggcctcttgctcttcaggatgaagagctatgtttaaacgtgcaagcgctactagacaattcagtacattaaaaacgtccgcaatgtgttattaagttgtctaagcgtcaatttgtttacaccacaatatatcctgcca

SEQ ID NO: 42 - DNA, 29318 bp, Artificial Sequence
  RX000012
gtttacccgccaatatatcctgtcaaacactgatagtttaaactgaaggcgggaaacgacaatctgatcatgagcggagaattaagggagtcacgttatgacccccgccgatgacgcgggacaagccgttttacgtttggaactgacagaaccgcaacgttgaaggagccactcagcaagctggtacgattgtaatacgactcactatagggcgaattgagcgctgtttaaacgctcttcaactggaagagcggttacgctgtttaaacgctcttcaactggaagagcggttactaccggttcactagctagctgctaatcgagctagttaccctatgaggtgacatgaagcgctcacggttactatgacggttagcttcacgactgttggtggcagtagcgtacgacttagctatagttccggacttacccttaagcgatttaaatctgcggttaccgaattcgagctcggtaccctgggatctgcccttactttaacgcctctaaccaacacccctttatctttataaggaacaataaacagaatttgccccactgttctaaatcacctaataatatccccagctaaaaacaataaaggtttcctagaattaagacaagcatgactgttcctccaggagggtttggaacattgttgcagtcttgcagatacgggcgaagggtgagaaacagagcggagggctggaggtgacctcggtagtcgacgccggagttgagcttgacaacgacggggcggcccctgatggacttgaggaagtccgatggcgtcttcaccgtcccgccggcgcccgaggcgggcctgtcgctgccgccgccgccgctgctcatcttgcgcgctgtgcccccggcggtgtccctgtgttgcggatcgcgggtgggccaggtggatgcgagggcgacccgtttggactccggccggagccgccggatccctggtcggtgtcagtgccgtttactctgggccccacgtgtcagtaccgtctgtagatgacaacaacccgtcgtccacagtcatgtccaaaatatcctttcttcttttttttcgattcggatatctatcttccttttttttttccaaaaatcttcttgacgcaccagcgcgcacgtttgtggtaaacgccgacacgtcggtcccacgtcgatagaccccacccaccagtgagtagcgtgtacgtattcgggggtgacggacgtgtcgccgtcgtcttgctagtcccattcccatctgagccacacatctctgaacaaaaaaaaggagggaggcctccacgcacatccccctccgtgccacccgccccaaaccctcgcgccgcctccgagacagccgccgcaaccatggccaccgccgccgccgcgtctaccgcgctcactggcgccactaccgctgcgcccaaggcgaggcgccgggcgcacctcctggccacccgccgcgccctcgccgcgcccatcaggtgctcagcggcgtcacccgccatgccgatggctcccccggccaccccgctccggccgtggggccccaccgagccccgcaagggtgctgacatcctcgtcgagtccctcgagcgctgcggcgtccgcgacgtaagtttctgcttctacctttgatatatatataataattatcattaattagtagtaatataatatttcaaatatttttttcaaaataaaagaatgtagtatatagcaattgcttttctgtagtttataacttcgtatagcatacattatacgaagttatacttttctaatatatgaccaaaatttgttaccgaattcaggcgacccatcgctgctttgtctacatcatgttcttcatcatcctccccaggcgacgcgtgctgctgttcttattcagactaccgttcgagtgactgcatggcgtacatctttctgcatcgactttgtacggctacatcgaacatatacacgagatgtctcgtgtgaatagagtcactaatgccttaagcatcggttactccgtagggtacattctgttcttcttatttgtgcatatttttattgttgtttactgattatacgagtagttatacatacatgcacatacatatcatcacatatatcacaatatttttctaaattaaattaaaactaaaaatgactaaatttctaacaccaacgacattgtaatgttttctccaacaactttacctattctacattgttctatttcgaatttcactctataaacaacatagtctacaatggaaaacagtgctttgtacgactatatacgcgatgtgtggctacaacataagacaatatagtcgtttgaagattgaacctatatatcggtacggttaatccgtctatgtacgtgggcatgacgaacacccgtgataacgaaggattaacgtgcacaatcataaatccaaagtaggagcggtgcatgatgagaatcgctctcagtactcgacataatgaaccttacgaggtacaacaggcaggcaggcagggaccaggggccgcctttatttcaggctcgctggccccacgggcgtgctgcgtgcacgaagggcactaccccaacctctcaccgaaaaccgcgctggatcggcaaatcaaacgaggtggtgccccgtgcccactctccacgtccacggcaccatccctctgcagccgctcaccagccatgccgtgtcgcggaacggcacaaccacccccaacccactcacgaaaccccgtcccggccgtgcccgtgtcggtccgcgctcggcaacgaggcggcccgcgctgctgagtcccctggacacccgacaccctgtcggccctttgtttattcatcccgaaatctcatctgcccccacggccgactgcgctgcgccgcccggatatatatacccatcgttatcgatcgactggggactctatcagtgatagagtctagaggatcgctcaggaaggccgctgagatagaggcatggcggccaatgcgggcggcggtggagcgggaggaggcagcggcagcggcagcgtggctgcgccggcggtgtgccgccccagcggctcgcggtggacgccgacgccggagcagatcaggatgctgaaggagctctactacggctgcggcatccggtcgcccagctcggagcagatccagcgcatcaccgccatgctgcggcagcacggcaagatcgagggcaagaacgtcttctactggttccagaaccacaaggcccgcgagcgccagaagcgccgcctcaccagcctcgacgtcaacgtgcccgccgccggcgcggccgacgccaccaccagccaactcggcgtcctctcgctgtcgtcgccgccgccttcaggcgcggcgcctccctcgcccaccctcggcttctacgccgccggcaatggcggcggatcggctgtgctgctggacacgagttccgactggggcagcagcggcgctgccatggccaccgagacatgcttcctgcaggactacatgggcgtgacggacacgggcagctcgtcgcagtggccacgcttctcgtcgtcggacacgataatggcggcggccgcggcgcgggcggcgacgacgcgggcgcccgagacgctccctctcttcccgacctgcggcgacgacggcggcagcggtagcagcagctacttgccgttctggggtgccgcgtccacaactgccggcgccacttcttccgttgcgatccagcagcaacaccagctgcaggagcagtacagcttttacagcaacagcaacagcacccagctggccggcaccggcaaccaagacgtatcggcaacagcagcagcagccgccgccctggagctgagcctcagctcatggtgctccccttaccctgctgcagggagtatgtgagagcaacgcgagctgccactgctcttcactggtaccgttaacagatcattcgacaaagcagcattagtccgttgatcggtggaagaccactcgtcagtgttgagttgaatgtttgatcaataaaatacggcaatgctgtaagggttgttttttatgccattgataatacactgtactgttcagttgttgaactctatttcttagccatgccaagtgcttttcttattttgaataacattacagcaaaaagttgaaagacaaaaaaaaaaacccccgaacagagtgctttgggtcccaagcttctttagactgtgttcggcgttccccctaaatttctccccctatatctcactcacttgtcacatcagcgttctctttccccctatatctccacgctctacagcagttccacctatatcaaacctctataccccaccacaacaatattatatactttcatcttcaactaactcatgtaccttccaatttttttctactaataattatttacgtgcacagaaacttagcaaggagagagagagcggggtgacccaccttgctagttggatattacctcttctcttcaaagtatccttgaacgctcaccggttatcaaatctctacactatagctctgtagtcttgctagatagttagttctttagctctcggtgaccaagcttggcgcgatcaagcttatcgataccgtcgacctcgaagcttggtcacccggtccgggcctagaaggccagcttcaagtttgtacaaaaaagcaggctccggccagaatggcccggaccgggttaccgaattcttaccctagctccctgcggctgttacgcggtcccccatcaatcttctgttcttgcggttgtagcctgtgtaacagtgctagagtatgtatgataaataggttttaagtctgcttacatgacattttttattgtggaagagacatataaaaattagagagagtggttctcatgcaacggcggacggcccggtgctaaaagagcttcaagacaaaataatgaaacaggaagagagtagatttatctaagagccaactttattatatgaatgtgtttattgttggctttagatgatatggtaaggagttagagctaataatagataggctctattattattattattaattaaactcgctctaaggaggaaagtgggaggaagggacgaggacgaagactactggaagcatcgtgcatggatgatggatgtggtgtctcttaatgtaggtggccggaggatgtacgtgttaattgcgcgataagcactcagatccaaccgcaaactacctccacactgacacactgatagagagaaagagagacctccgacgactgccgccgcagatgagccacgtacgtatacgacgtctgccggccggctcaggctgccgccatcaccctgctcgaaagtcgcgttaggcggcgccagctacataggagtatctagtctagccagttagtatactactactgcgctgatgatgaattaactctgcatagatactgtacttgcctccctccaacacccaaccacctcctgctcggctcttaataacttggacacggatcgatgccatccaaggaagaacacgacgacgacgacggaacatccaccatgcaagcttgcatccatacgccgatacgcgtgcatccatccatccaccattatttccattttccaccgatcacacgtacacaggcctatttaaggagcgacatcccactgcaactctcctcaccactcatcaccagctagctctagcaaagcacttgccatctaccgaccgccgcattccaaacagcccgacgagctagcagagcggcaggcacctccctcctcaaggaacccatggccactgtgaacaactggctcgctttctccctctccccgcaggagctgccgccctcccagacgacggactccacactcatctcggccgccaccgccgaccatgtctccggcgatgtctgcttcaacatcccccaagattggagcatgaggggatcagagctttcggcgctcgtcgcggagccgaagctggaggacttcctcggcggcatctccttctccgagcagcatcacaaggccaactgcaacatgatacccagcactagcagcacagtttgctacgcgagctcaggtgctagcaccggctaccatcaccagctgtaccaccagcccaccagctcagcgctccacttcgcggactccgtaatggtggcttcctcggccggtgtccacgacggcggtgccatgctcagcgcggccgccgctaacggtgtcgctggcgctgccagtgccaacggcggcggcatcgggctgtccatgattaagaactggctgcggagccaaccggcgcccatgcagccgagggtggcggcggctgagggcgcgcaggggctctctttgtccatgaacatggcggggacgacccaaggcgctgctggcatgccacttctcgctggagagcgcgcacgggcgcccgagagtgtatcgacgtcagcacagggtggagccgtcgtcgtcacggcgccgaaggaggatagcggtggcagcggtgttgccggcgctctagtagccgtgagcacggacacgggtggcagcggcggcgcgtcggctgacaacacggcaaggaagacggtggacacgttcgggcagcgcacgtcgatttaccgtggcgtgacaaggcatagatggactgggagatatgaggcacatctttgggataacagttgcagaagggaagggcaaactcgtaagggtcgtcaagtctatttaggtggctatgataaagaggagaaagctgctagggcttatgatcttgctgctctgaagtactggggtgccacaacaacaacaaattttccagtgagtaactacgaaaaggagctcgaggacatgaagcacatgacaaggcaggagtttgtagcgtctctgagaaggaagagcagtggtttctccagaggtgcatccatttacaggggagtgactaggcatcaccaacatggaagatggcaagcacggattggacgagttgcagggaacaaggatctttacttgggcaccttcagcacccaggaggaggcagcggaggcgtacgacatcgcggcgatcaagttccgcggcctcaacgccgtcaccaacttcgacatgagccgctacgacgtgaagagcatcctggacagcagcgccctccccatcggcagcgccgccaagcgcctcaaggaggccgaggccgcagcgtccgcgcagcaccaccacgccggcgtggtgagctacgacgtcggccgcatcgcctcgcagctcggcgacggcggagccctggcggcggcgtacggcgcgcactaccacggcgccgcctggccgaccatcgcgttccagccgggcgccgccagcacaggcctgtaccacccgtacgcgcagcagccaatgcgcggcggcgggtggtgcaagcaggagcaggaccacgcggtgatcgcggccgcgcacagcctgcaggacctccaccacctgaacctgggcgcggccggcgcgcacgactttttctcggcagggcagcaggccgccgccgctgcgatgcacggcctgggtagcatcgacagtgcgtcgctcgagcacagcaccggctccaactccgtcgtctacaacggcggggtcggcgacagcaacggcgccagcgccgtcggcggcagtggcggtggctacatgatgccgatgagcgctgccggagcaaccactacatcggcaatggtgagccacgagcaggtgcatgcacgggcctacgacgaagccaagcaggctgctcagatggggtacgagagctacctggtgaacgcggagaacaatggtggcggaaggatgtctgcatgggggactgtcgtgtctgcagccgcggcggcagcagcaagcagcaacgacaacatggccgccgacgtcgggcatggcggcgcgcagctcttcagtgtctggaacgacacttaagcgtacctagtggtacctgacatcttatagtctgcaacctctcgtgtctgaattcctatctttatcaagtgttattgcttccacgactataggacagctttcgtcgaaagcttttgctcatgtgatctcgaaggattcatctagtctgatttttcgtgacttgtatcggttttattggattcatccaacatatatcaataaaaaatgagttgtgtttcctttcttcctagttcagttaaaattatttccctcctgcgcttgtgctgtaattgtctgtgtacctgttgtttgtgactgtgttagttcccttggatatgatttcgtatttgatatgtacatggagatagcttagcttcattattggagtatgaagttagtatgacatagtcactctcctggaaaattgacactgcaaaccatatttttattctgaaccacaaatcctagtcagtccgctggcatatgccgtccgtttgctgaatccagaacgtgggtttggagatgtacggctgagatgcctctatgcgaaggggatttcgtggtgaaacgagatgggagtagagcaacgcccgtggaagatgcttcaaacttccacacttttgagcaacgatcggcagtagtaaggtagacgatttcaagatcaaagcatatgaagataaacaacatcaacaacaaaatttgttggggttctatagagagaaacagagctacatacatacactgttttgtatctaccatctgagatgatgaaaagatgaaaaactaaagaatgccccggcgccaacgccaggacacgccgcgcgcgcgtcacccgagccatctcttgacccagccggcgctgtatatttacacacgttgcagcatcgatcaccacctgttcgatcgcgtcgccgtcaccgggatctgagtcgaaacctagacttgtccatcttctggattggccaacttaattaatgtatgaaataaaaggatgcacacatagtgacatgctaatcactataatgtgggcatcaaagttgtgtgttatgtgtaattactagttatctgaataaaagagaaagagatcatccatatttcttatcctaaatgaatgtcacgtgtctttataattctttgatgaaccagatgcatttcattaaccaaatccatatacatataaatattaatcatatataattaatatcaattgggttagcaaaacaaatctagtctaggtgtgttttgcgaatgcgaccttcttatgtgcttctagtctccaaatgtggttgatagttattttgctctaagatcaacagtaatgaagtataaatcatcgttgtggtgtgctactcggttaattgagcattaacacacacaaacatgacgaggatggtataatctccaaaaatgtgtactttgttaggtgggaccctatagccttgattaatgtgctatgttaggcatgcctggaaacgtgtgacgcatatgttttgtgaacctgttgatattatatgtgcttttatattaccatattttattaaaatactaatatttattactagtaagatataacattctatctagcttaaaaactaaccataaatattccataataactagatttaccaaactaatatactaaatatacataataaatacaaaattaacaagacaataatcaatatttatgagcttaatatatttagacattatggttggtcgacgataatcatgctaacttttcgtaattgcttgattgaaatatgcttagaataatgcctctttgttctacatggcaaatagggaccattatggtgtaacaccctgggaaccacaaacaccccgaaatgctactaaactacacaactaaccttcatatataaaatttcgacagcatctcctttgaaaatttgcatagacgtggaagcaacagagtataaacagatatcatgataagaaaacatactagacattaataatctgctagaaatgggaagaatcctaacttgacgactgcgtaactgactagagtcacacttagctgaccctagtcacttacaactgacttcgtgtcctagatcgatgggccctggccgaagcttggtcacccggtccgggcctagaaggccagcttcaagtttgtaccctggagcttgccgagtgccatccttggacactcgataaagtatattttattttttttattttgccaaccaaactttttgtggtatgttcctacactatgtagatctacatgtaccattttggcacaattacatatttacaaaaatgttttctataaatattagatttagttcgtttatttgaatttcttcggaaaattcacatttaaactgcaagtcactcgaaacatggaaaaccgtgcatgcaaaataaatgatatgcatgttatctagcacaagttacgaccgatttcagaagcagaccagaatcttcaagcaccatgctcactaaacatgaccgtgaacttgttatctagttgtttaaaaattgtataaaacacaaataaagtcagaaattaatgaaacttgtccacatgtcatgatatcatatatagaggttgtgataaaaatttgataatgtttcggtaaagttgtgacgtactatgtgtagaaacctaagtgacctacacataaaatcatagagtttcaatgtagttcactcgacaaagactttgtcaagtgtccgataaaaagtactcgacaaagaagccgttgtcgatgtactgttcgtcgagatctctttgtcgagtgtcacactaggcaaagtctttacggagtgtttttcaggctttgacactcggcaaagcgctcgattccagtagtgacagtaatttgcatcaaaaatagctgagagatttaggccccgtttcaatctcacgggataaagtttagcttcctgctaaactttagctatatgaattgaagtgctaaagtttagtttcaattaccaccattagctctcctgtttagattacaaatggctaaaagtagctaaaaaatagctgctaaagtttatctcgcgagattgaaacagggccttaaaatgagtcaactaatagaccaactaattattagctattagtcgttagcttctttaatctaagctaaaaccaactaatagcttatttgttgaattacaattagctcaacggaattctctgtttttctaaaaaaaaactgcccctctcttacagcaaattgtccgctgcccgtcgtccagatacaatgaacgtacctagtaggaactcttttacacgctcggtcgctcgccgcggatcggagtccccggaacacgacaccactgtggaacacgacaaagtctgctcagaggcggccacaccctggcgtgcaccgagccggagcccggataagcacggtaaggagagtacggcgggacgtggcgacccgtgtgtctgctgccacgcagccttcctccacgtagccgcgcggccgcgccacgtaccagggcccggcgctggtataaatgcgcgccacctccgctttagttctgcatacagccaacccaaggatgtccaacctgctcacggttcaccagaaccttccggctcttccagtggacgcgacgtccgatgaagtcaggaagaacctcatggacatgttccgcgacaggcaagcgttcagcgagcacacctggaagatgctgctctccgtctgccgctcctgggctgcatggtgcaagctgaacaacaggaagtggttccccgctgagcccgaggacgtgagggattaccttctgtacctgcaagcgcgaggtttgtttctgcttctacctttgatatatatataataattatcattaattagtagtaatataatatttcaaatatttttttcaaaataaaagaatgtagtatatagcaattgcttttctgtagtttataagtgtgtatattttaatttataacttttctaatatatgaccaaaacatggtgatgcctaggtctggcagtgaagaccatccagcaacaccttggacaactgaacatgcttcacaggcgctccggcctcccgcgccccagcgactcgaacgccgtgagcctcgtcatgcgccgcatcaggaaggaaaacgtcgatgccggcgaaagggcaaagcaggccctcgcgttcgagaggaccgatttcgaccaggtccgcagcctgatggagaacagcgacaggtgccaggacattaggaacctggcgttcctcggaattgcatacaacacgctcctcaggatcgcggaaattgcccgcattcgcgtgaaggacattagccgcaccgacggcggcaggatgcttatccacattggcaggaccaagacgctcgtttccaccgcaggcgtcgaaaaggccctcagcctcggagtgaccaagctcgtcgaacgctggatctccgtgtccggcgtcgcggacgacccaaacaactacctcttctgccgcgtccgcaagaacggggtggctgcccctagcgccaccagccaactcagcacgagggccttggaaggtattttcgaggccacccaccgcctgatctacggcgcgaaggatgacagcggtcaacgctacctcgcatggtccgggcactccgcccgcgttggagctgctagggacatggcccgcgccggtgtttccatccccgaaatcatgcaggcgggtggatggacgaacgtgaacattgtcatgaactacattcgcaaccttgacagcgagacgggcgcaatggttcgcctcctggaagatggtgactgagctagacccagctttcttgtacaaagtggccgttaacggatccagacttgtccatcttctggattggccaacttaattaatgtatgaaataaaaggatgcacacatagtgacatgctaatcactataatgtgggcatcaaagttgtgtgttatgtgtaattactagttatctgaataaaagagaaagagatcatccatatttcttatcctaaatgaatgtcacgtgtctttataattctttgatgaaccagatgcatttcattaaccaaatccatatacatataaatattaatcatatataattaatatcaattgggttagcaaaacaaatctagtctaggtgtgttttgcgaattgcggcaagctgttaccgaattcctgcccttaaggccaattgttcaagattcattcaacaattgaaacatctcccatgattaaatcagtataaggttgctatggtcttgcttgacaaagtttttttttgagggaatttcaactaaatttttgagtgaaactatcaaatactgattttaaaaaatttttataaaaggaagcgcagagataaaaggccatctatgctacaaaagtacccaaaaatgtaatcctaaagtatgaattgcattttttttttgtttggacgaaaggaaaggagtattaccacaagaatgatatcatcttcatatttagatcttttttgggtaaagcttgagattctctaaatatagagaaatcagaagaaaaaaaaaccgtgttttggtggttttgatttctagcctccacaataactttgacggcgtcgacaagtctaacggacaccaagcagcgaaccaccagcgccgagccaagcgaagcagacggccgagacgttgacaccttcggcgcggcatctctcgagagttccgctccggcgctccacctccaccgctggcggtttcttattccgttccgttccgcctcctgctctgctcctctccacaccacacggcacgaaaccgttacggcaccggcagcacccagcacgggagaggggattcctttcccaccgttccttccctttccgccccgccgctataaatagccagccccatccccagcttttttccccaatctcatctcctctctcctgttgttcggagcacacgcacaatccgatcgatccccaaatccccttcgtctctcctcgcgagcctcgtggatcccagcttcaaggtacggcgatcgatcatcccccctccttctctctaccttcttttctctagactacatcggatggcgatccatggttagggcctgctagtttcccttcctgttttgtcgatggctgcgaggcacaatagatctgatggcgttatgacggctaacttgtcatgttgttgcgatttatagtccctttaggagatcagtttaatttctcggatggttcgagatcggtggtccatggttagtaccctaagatccgcgctgttagggttcgtagatggaggcgacctgttctgattgttaacttgtcagtacctgggaaatcctgggatggttctagctcgtccgcagatgagatcgatttcatgatcctctgtatcttgtttcgttgcctaggttccgtctaatctatccgtggtatgatgtagatgttttgatcgtgctaactacgtcttgtaaagttaattgtcaggtcataatttttagcatgcctttttttttgtttggttttgtctaattgggctgtcgttctagatcagagtagaagactgttccaaactacctgctggatttattgaacttggatctgtatgtgtgtcacatatcttcataaattcatgattaagatggattgaaatatcttttatctttttggtatggatagttctatatgttggtgtggctttgttagatgtatacatgcttagatacatgaagcaacgtgctgctactgtttagtaattgctgttcatttgtctaataaacagataaggatatgtatttatgttgctgttggttttgctggtactttgttggatacaaatgcttcaatacagaaaacagcatgctgctacgatttaccatttatctaatcttatcatatgtctaatctaataaacaaacatgcttttaaattatcttcatatgcttggatgatggcatacacagcggctatgtgtggttttttaaatacccagcatcatgggcatgcatgacactgctttaatatgctttttatttgcttgagactgtttcttttgtttatactgaccctttagttcggtgactcttctgcaggtcgactttaacttagcctaggatccatggcccagtccaagcacggcctgaccaaggagatgaccatgaagtaccgcatggagggctgcgtggacggccacaagttcgtgatcaccggcgagggcatcggctaccccttcaagggcaagcaggccatcaacctgtgcgtggtggagggcggccccttgcccttcgccgaggacatcttgtccgccgccttcatgtacggcaaccgcgtgttcaccgagtacccccaggacatcgtcgactacttcaagaactcctgccccgccggctacacctgggaccgctccttcctgttcgaggacggcgccgtgtgcatctgcaacgccgacatcaccgtgagcgtggaggagaactgcatgtaccacgagtccaagttctacggcgtgaacttccccgccgacggccccgtgatgaagaagatgaccgacaactgggagccctcctgcgagaagatcatccccgtgcccaagcagggcatcttgaagggcgacgtgagcatgtacctgctgctgaaggacggtggccgcttgcgctgccagttcgacaccgtgtacaaggccaagtccgtgccccgcaagatgcccgactggcacttcatccagcacaagctgacccgcgaggaccgcagcgacgccaagaaccagaagtggcacctgaccgagcacgccatcgcctccggctccgccttgccctccggactcagatctcgatagggtaccaatggccagttaacagatccagctgctgctgttctagggttcacaagtctgcctatttgtcttccccaatggagctatggttgtctggtctggtccttggtcgtgtcccgtttcattgtgtactatttacctgtaatgtgtatccttaagtctggtttgatggtgtctgaaacgttttgctgtggtagagcagcatggaagaactataatgaataagtgatccctaatcattgtgtccaaattttgcttctgctatacccttttgtgctgtttcttatgttttgcttaaaaatttgatctgacaaacaaatttgtctaaattatgctcttgttctgactgtgtactgtacacatttgtattgctaccggtttggcacatagttttctctttgattgcagatcaaacccttctgattgcagattgcttggctatggctgatgtgctcactgttcttctttagcttgtatattgctgatggtggcttggctacggctgaaaaagttgctgctgcgccgacttggcaactgttgctccagtaatgctttgtcctctcttcctagccgccgacttggcacttggcagctgttgctcctgtaatgcgttgttatctcttatctcttgagatgtactatgattttgaggctgtttgacttgtgccagattgccagtgctgatgctatattatctcaggtttttatgctagtatatgttttactgtgtgctgcctgtgtcgagttacgtaatctattgaaccgctatgcgtgttgatgccctgttgttgcttgccagattgatgcccctgttgcttgcagcttgcaagctgtagtgaaatcctaaaattcgaaaccaaatctattctgaacttttgaagatctgtgatgtccggaagaaaagattcaaacagataaacgggactctccagaatctataaaataaatgatcgacaaacgctttgctttggtaggcttcctagttagttagcggaccgaagcttcggtccgggcctagaaggccagcttcggccgccccatttcaaatatttttttcaaaataaaagaatgtagtatatagcaattgcttttctgtagtttataacttcgtatagcatacattatacgaagttatacttttctaatatatgaccaaaatttgttgatgtgcaggtcttcgcctaccccggcggcgcgtccatggagatccaccaggcactcacccgctcccccgtcatcgccaaccacctcttccgccacgagcaaggggaggcctttgccgcctccggctacgcgcgctcctcgggccgcgtcggcgtctgcatcgccacctccggccccggcgccaccaacctagtctccgcgctcgccgacgcgctgctcgattccgtccccatggtcgccatcacgggacaggtggcgcgacgcatgattggcaccgacgccttccaggagacgcccatcgtcgaggtcacccgctccatcaccaagcacaactacctggtcctcgacgtcgacgacatcccccgcgtcgtgcaggaggctttcttcctcgcctcctctggtcgaccagggccggtgcttgtcgacatccccaaggacatccagcagcagatggcggtgcctgtctgggacaagcccatgagtctgcctgggtacattgcgcgccttcccaagccccctgcgactgagttgcttgagcaggtgctgcgtcttgttggtgaatcgcggcgccctgttctttatgtgggcggtggctgcgcagcatctggtgaggagttgcgacgctttgtggagctgactggaatcccggtcacaactactcttatgggcctcggcaacttccccagcgacgacccactgtctctgcgcatgctaggtatgcatgggacggtgtatgcaaattatgcagtggataaggccgatctgttgcttgcacttggtgtgcggtttgatgatcgcgtgacagggaagattgaggcttttgcaagcagggctaagattgtgcacgttgatattgatccggctgagattggcaagaacaagcagccacatgtgtccatctgtgcagatgttaagcttgctttgcagggcatgaatgctcttcttgaaggaagcacatcaaagaagagctttgactttggctcatggaacgatgagttggatcagcagaagagggaattcccccttgggtataaaacatctaatgaggagatccagccacaatatgctattcaggttcttgatgagctgacgaaaggcgaggccatcatcggcacaggtgttgggcagcaccagatgtgggcggcacagtactacacttacaagcggccaaggcagtggttgtcttcagctggtcttggggctatgggatttggtttgccggctgctgctggtgcttctgtggcaaacccaggtgtcactgttgttgacatcgatggagatggtagctttctcatgaacgttcaggagctagctatgatccgaattgagaacctcccagtgaaggtctttgtgctaaacaaccagcacctggggatggtggtgcagttggaggacaggttctataaggccaacagagcgcacacatacttgggaaacccagagaatgaaagtgagatatatccagatttcgtgacgatcgccaaagggttcaacattccagcggtccgtgtgacaaagaagaacgaagtccgcgcagcgataaagaagatgctcgagactccagggccgtacctcttggatataatcgtcccacaccaggagcatgtgttgcctatgatccctagtggtggggctttcaaggatatgatcctggatggtgatggcaggactgtgtactgatgactagctagtcagttaacagatctgccagatcctcggtgtacaaataacccgtcttatcctatgagacgggccggcgtcagtgtgttctggaggaatttttatgtcagagcctttttctttgtgtgcttgatgtagatgccaagggaagcttattggctgttgaagcttgatgcaaaataaattatggaactctgttttttgtttatctaataataactagcaaatatgcttccattgcattgaaactaacagccttttgtgtttccaagttttattttgtgacaatgtcatctatttcaattagttgtggaatcggaaacttgcaggactaacttggaaactccaatccctcagcatcctggactttttcctggtgtaatccatgtagatattattttaatcatcattttagttctggaggtttttccatctccggttttgctcccctttcttcaaaaaaaaaaaaaaaatgccgtaggcgccgcaacgcccacctgttgttcaaactcatgggcacgagtggctcgaagattttatacaacaattgctgtagtttcaccgttgctggtgaagaagcatttttttaaaaaaatatagtggtattcattttaattagtttagttgtgcagcgagcaaaatttggacatgctctgctcggaatctgatcgacctagacacagattagcagcagtagctttgtcatctgttccaagagttgcgatctgatagaagaaaaaaaaaccttcccttcaatgtaaaaccgaaactaacaagaaagaagcacagtgccgtttaggcaagtatggagtacgtattaagcatgtagaaggccatgcatgaaccactaacaagaaagaagcgcagtgccattcaggcaagcataagcatgtagattggcatgcatgaacaactaacagtagatcgtctctggtctgattagaagttttttgggaagccaagaaatcatgtacaactggttccatctcaaattccgtggcaaaaagaggcctaagcaacataaagctttccactggttgccatatatgatttgggcatttcactttgatcttaatgggccttgtaaagcccaagactcatgattatctttagttgatgctcttaattaggtgtgggcaaataattcaaactgtatgtacccgaccaaaaccaaagcaaaaataatcgaaccaaaccgaaaatttaaaaataaccgaatgaaaactaaatcctataactgaaagaactgaaaccgaatcaaaatatttaatgtaaccaaaaatatccgaaatataattatattgtcaaaaatattaataatttctagattaaataattaaaaatacttaaaaatttatataaaatagtaaaaatactcgaaaataaccacaaatattcaaaaacaaccgaaatatcccaaaatattcaaagcaaaataaccgaatggataccaaattttaaaaccgaaaaaactggaacaaaaccaaaatcgaaccaaaatttcaaaaatcgaataaatactaaactttagaacaaaaaaaaacgataaccgaatgtatacgaaccaaagccgaattagataaccgaacgtccaggactactcttaatctttccgccacttatgatttgggctattactttgtttataatgagccttttcaagctcaagttcatgattgtccgtgagatgagaaactgacttgttggattcgaaaccctagctagtattggttaatacttaatacataaatgacctgcattgacatcatcatccaagaaaataaaaattgtatgcttgagatatttagttttcctagctaggttttctttattttagtaccgaatctttaggtgtgccacgttaatttagacccattttttcatacttaccaactgagtctagtttaatcatgactataatcgtataaaatgattcagtcgacgtcattgcgaacgtatataaaatcatccaaattgacgtcattccaaagaggtaagcatgcttatctaagagtccgagcatactaaacaagacgacattttatttgcactccaaatcaaattttgtattgcctaaagaaaaacaatcaaactcaagtttcttaaaattaatttcattcaaactaatcactttcaatatctcacatattattcatgccatttctatttgtctaaacatgatttaaaaaaaaaagtaaaatacaaagattactatgcaaaaactctataaaaaaaaattcaaatttcttatttatttgtgacatcaaattttcaaaataatttttttaattatcggttgatccggtcagtcgataaaaacataaactttcagcgaccgttaaaactttcctactaccgatttagagaaaatcttagcttgaaacgtaattgtaacctgccttcatgcaagtcgcaagatatgtcatcctaagttgtatatgttttctcaaaagatgtatttacttgagaaaatacgtttcaacgttgatggacaaccaattaagaatcaagcacctttcgtaatcaatttaggcttatcgtctaaggtatactgatttacgacagttgactagacttataaggaacaaaataatagaatagtttctaaacacttcacctaatcatagagactaagatggtaattcgtaaacgacaaagcctagtgacactgtccattgtaaaattccacatcatattagtattaaacatatacatgtagtttcctgaacacatgtagtatcaaacacacttcgtggcttcttcctcgaaacctgcggccgctcattaattaagtcatctagttgaaggatcgctatcaactttgtatagaaaagttgggccgaattcgagctcggtacggccagaatggcccggaccgaagcttaccggtcaaccaatcaggatttctttgtagggtcgagagaaggaggaagtactctccatgccatgcacgccacagtattgaatgtttttggcatggtcatactagccgtgtgtctctgttccatttggccagccagctccaattatttggcatgatcatcctgtcatactagcagtagcagcgtcatcttcgccgctggccgccccctgcaggctgcagtgtcacacatgcctaatcctgcagtcctgccttttgccttccaaaccgtgtgagccttccgtgcgctcgtcaagtttatgggctgtatttttccgagaggagcctaatgggccaaaagcaaggccttttgggccaatcacgatgggccttaggacactttctaaggcaagaacatgaacctttttctttttctcatattgtcatctgcgtattgtttcatgaagttgctatgcaacgtcacctgaagttgtaaccaactccacgtcacctgaagttgtaaccaactccacgcatataatattggtcctattttgcagagcgtaggttctgttggatctacctgatcaatagttagcggctagtgtaaataaaatagatcctatgatccatctaagtttgaattttcatgtttaataatcagtatgtgactatttaaactaatcttatttgctaatgttttttcgatatagtttaaaggctgtagaatatacttgaacttaggcaaagtggtgaccgagatgatcaacacatcaatcaagacgttagaagccttgatgaaacattcacgagagacgagcaaggagtctaagacgctaagataaataaaacctagaccaaggcatgtggagaaataaagtcaaacaaatgctactcgacaacatccagcttgtccagtactgcaccagaccagcccagagacaaaaagttcaaaagcatgtaaaaagaacgcaacggtaacacaccagatgtgtccggtgctatgccctatgacataaccaacgccacaatgtgcacgatgtgctctagaatgtgaggccagacgcatccggtggcacaacgaacactttactcatctagggttatagagtggattgcaacatgacttggagatgacgacaacttaccgaacgtcacatttgacgacagatctccaatggccaataactgctggaaagccaatagatacgtcacatggacgcaccaaacgtgtttggtgtctatgtaaaatttgttgtgtatccccacgaccacatttacattgggggctatatatacccccttgctagccaaatagagggtggtagagtatgttgaaattgtaggagagtgtcaagacacttcatcaagtgctctaaccacacaaaaaacacttaacaaaagattagatgagcagcatagtgatttttgtgaattgcttatgctagttaaacacatttatttacccttgttgtaggttagggcctagtgtttagtgttgtttgcatagcgctcttaccactcatacactatttttgtacaccaggggcctgaagtcttacaccaatcgtgtttatggtgtgttcgtcaccgtgtgctaaaggaaacgaagcccacaaggaccgattcaggagaagccattttagagacacacttatgtgtagtcaagtcacatgatctattcatagagttattcgacctagagcttgacccttgtacgggaatttatgcgatgagctttaatgaggactaagaaagctaagatacaattaaacttattccgaaaccgacaattaaagacacttcttgggacggagggagtagctgacgttccgtaatgcatgcaagagaagtgaggagggccacgctagagaagagaagtacagaacggaatgagggacggtggcgcatgtccccgcaagatcctgagctgattctaaatcaagcatttgcttgaccaagtctatgcggcgcagagcccgcccgcgccctatgcttgctccggagctctcgttcgttccctgccgcggcagccatcgatcaccggccccaacgctagctttagcttcgcctatttacatacccgagcggagaagagaagagaagagaagcgatcgggattgtgggcgagtgcgtgcgttcgtgcagccacagacaggcgtccgggcacccctaggcgcgccatttaaatatggaccaccacctcacgccgacgccgccgccgccgccgccgccgatggggaactccgcggcgggggcgtcctcgaagccgccgacgccggcgtccacgcccaactcgcgcctcgcctcggcgccgtcctcccgccacgccgccacgccgccgcacgcgtcggcggcggcgtccgccccggcgccggcctcgcgcaccgtctacagcgaccgcttcatccccagccgcaccggatccaacctcgcgctcttcgacctcgccccctcgccctcctccgccgcctcgtcctcgcactcgcacgacgccggccccgcggcctcgtccggatctgcgcagcccgccgcgtcgccctactgcacgctcctccgcgccgcgctcttcggccccgacacgcccgaccgcgtcgcgtcctcggccgccgcgtgctcctcgtcgtcgtcctccttctccccggggccctcgcctgtcggcacccccgccaccgggaacatcttcagattcaagacggaggtgcgccggaacgccaagagggcgcttttttcgggagaccaagaggaggacgcgctgttccccggcattttcaccaccaggggcgcgggaccaaggaaggtgccaaggtcgccgtacaaggtgctggatgcgcccgctttgcaggacgacttctacctcaacctcgtcgattggtcttcacataacgtccttgctgtcgggttgggcaattgcgtttacttgtggaatgcatgcagcagcaaggtcaccaagctttgtgatttgggggtggatgacaatgtttgctctgtggggtgggcgcagcgcggcactcacctagctgtaggcacaaagcaaggaaaagttcagatctgggatgcaactcgttgtaaaagaataagaactatggaaagccatcgcatgcgtgtaggtgctcttgcatggagttcttctttgctttcttctggaagccgtgacaagagcatcctccaccatgatatccgtgctcaagaagattatgttagcaagcttaccgggcataaatctgaggtttgtggactcaagtggtcttatgacaatcgtcagcttgcatccggaggcaatgacaatggactttttgtttggaatccacattcagtacaaccagtactgaagtatactgagcacacagcagctgtcaaagctattgcctggtcacctcatctccacggcctgcttgcatctggtggaggaactgcagatagatgcatacgattctggaatacgaccacaaatacacacttgagttgtgtggacactggcagccaggtctgcaatcttgcgtggtcaaagaatgtgaatgagcttgttagcacccacgggtactcccagaaccagataattgtttggagatatccaacaatgtcgaagcttgccactttgacagggcacacgtaccgagtattgtatttagctatttcccctgacggccagaccatagttactggtgccggtgacgaaacactccgtttttggaacgtgttcccctctccaaagtcccagagctctgatagtctaagttgcatcgggggtacatcgtttgttagaagctacatccggatttaaatgcccgggcgatcgctcgaggcgtacctagtggtaccacatggttaacctagacttgtccatcttctggattggccaacttaattaatgtatgaaataaaaggatgcacacatagtgacatgctaatcactataatgtgggcatcaaagttgtgtgttatgtgtaattactagttatctgaataaaagagaaagagatcatccatatttcttatcctaaatgaatgtcacgtgtctttataattctttgatgaaccagatgcatttcattaaccaaatccatatacatataaatattaatcatatataattaatatcaattgggttagcaaaacaaatctagtctaggtgtgttttgcgaatgcggccgccaccgcggtggagctcgaattccggtccgggcctagaaggccagcttcaagtttgtacaaaaaagcaggctccggccagaatggcccggaccgggttaccgaattcgagctcggtaccctgggatccgatatcgatgggccctggccgaagcttggtcacccggtccgggcctagaaggccgatctcccgggcacccagctttcttgtacaaagtggccgttaacggatcggccagaatggcccggaccgaagcttgcatgcctgcagtgcagcgtgacccggtcgtgcccctctctagagataatgagcattgcatgtctaagttataaaaaattaccacatattttttttgtcacacttgtttgaagtgcagtttatctatctttatacatatatttaaactttactctacgaataatataatctatagtactacaataatatcagtgttttagagaatcatataaatgaacagttagacatggtctaaaggacaattgagtattttgacaacaggactctacagttttatctttttagtgtgcatgtgttctcctttttttttgcaaatagcttcacctatataatacttcatccattttattagtacatccatttagggtttagggttaatggtttttatagactaatttttttagtacatctattttattctattttagcctctaaattaagaaaactaaaactctattttagtttttttatttaataatttagatataaaatagaataaaataaagtgactaaaaattaaacaaataccctttaagaaattaaaaaaactaaggaaacatttttcttgtttcgagtagataatgccagcctgttaaacgccgtcgacgagtctaacggacaccaaccagcgaaccagcagcgtcgcgtcgggccaagcgaagcagacggcacggcatctctgtcgctgcctctggacccctctcgagagttccgctccaccgttggacttgctccgctgtcggcatccagaaattgcgtggcggagcggcagacgtgagccggcacggcaggcggcctcctcctcctctcacggcaccggcagctacgggggattcctttcccaccgctccttcgctttcccttcctcgcccgccgtaataaatagacaccccctccacaccctctttccccaacctcgtgttgttcggagcgcacacacacacaaccagatctcccccaaatccacccgtcggcacctccgcttcaaggtacgccgctcgtcctcccccccccccctctctaccttctctagatcggcgttccggtccatgcatggttagggcccggtagttctacttctgttcatgtttgtgttagatccgtgtttgtgttagatccgtgctgctagcgttcgtacacggatgcgacctgtacgtcagacacgttctgattgctaacttgccagtgtttctctttggggaatcctgggatggctctagccgttccgcagacgggatcgatttcatgattttttttgtttcgttgcatagggtttggtttgcccttttcctttatttcaatatatgccgtgcacttgtttgtcgggtcatcttttcatgcttttttttgtcttggttgtgatgatgtggtctggttgggcggtcgttctagatcggagtagaattctgtttcaaactacctggtggatttattaattttggatctgtatgtgtgtgccatacatattcatagttacgaattgaagatgatggatggaaatatcgatctaggataggtatacatgttgatgcgggttttactgatgcatatacagagatgctttttgttcgcttggttgtgatgatgtggtgtggttgggcggtcgttcattcgttctagatcggagtagaatactgtttcaaactacctggtgtatttattaattttggaactgtatgtgtgtgtcatacatcttcatagttacgagtttaagatggatggaaatatcgatctaggataggtatacatgttgatgtgggttttactgatgcatatacatgatggcatatgcagcatctattcatatgctctaaccttgagtacctatctattataataaacaagtatgttttataattattttgatcttgatatacttggatgatggcatatgcagcagctatatgtggatttttttagccctgccttcatacgctatttatttgcttggtactgtttcttttgtcgatgctcaccctgttgtttggtgttacttctgcaggtcgactttaacttagcctaggatccatggcctcctccgagaacgtcatcaccgagttcatgcgcttcaaggtgcgcatggagggcaccgtgaacggccacgagttcgagatcgagggcgagggcgagggccgcccctacgagggccacaacaccgtgaagctgaaggtgaccaagggcggccccctgcccttcgcctgggacatcctgtccccccagttccagtacggctccaaggtgtacgtgaagcaccccgccgacatccccgactacaagaagctgtccttccccgagggcttcaagtgggagcgcgtgatgaacttcgaggacggcggcgtggcgaccgtgacccaggactcctccctgcaggacggctgcttcatctacaaggtgaagttcatcggcgtgaacttcccctccgacggccccgtgatgcagaagaagaccatgggctgggaggcctccaccgagcgcctgtacccccgcgacggcgtgctgaagggcgagacccacaaggccctgaagctgaaggacggcggccactacctggtggagttcaagtccatctacatggccaagaagcccgtgcagctgcccggctactactacgtggacgccaagctggacatcacctcccacaacgaggactacaccatcgtggagcagtacgagcgcaccgagggccgccaccacctgttcctgtagggtaccacatggttaacctagacttgtccatcttctggattggccaacttaattaatgtatgaaataaaaggatgcacacatagtgacatgctaatcactataatgtgggcatcaaagttgtgtgttatgtgtaattactagttatctgaataaaagagaaagagatcatccatatttcttatcctaaatgaatgtcacgtgtctttataattctttgatgaaccagatgcatttcattaaccaaatccatatacatataaatattaatcatatataattaatatcaattgggttagcaaaacaaatctagtctaggtgtgttttgcgaatgcggccgccaccgcggtggagctcgaattccggtccgggcctagaaggccagcttcggccgccccgggcaactttattatacaaagttgatagatcctcatgtcttcatcgtaagcttaaacaggccagaatggcctctggattcagcggcctagaaggccgaagtacttggtcttcctagtcgagtagatcacattcaagcttggtcacccggtccgtcaatattctgattccgatgacttcgtaggttcctagctcaagccgctcgtgtccaagcgtcacttacgattagctaatgattacggcatctaggaccgactagtggcgcgccgactagctagctaaggtaccgagctcgaattcattccgattaatcgtggcctcttgctcttcaggatgaagagctatgtttaaacgtgcaagcgctactagacaattcagtacattaaaaacgtccgcaatgtgttattaagttgtctaagcgtcaatttgtttacaccacaatatatcctgcca

SEQ ID NO: 43 - DNA, 29294 bp, Artificial Sequence
  RX000013
gtttacccgccaatatatcctgtcaaacactgatagtttaaactgaaggcgggaaacgacaatctgatcatgagcggagaattaagggagtcacgttatgacccccgccgatgacgcgggacaagccgttttacgtttggaactgacagaaccgcaacgttgaaggagccactcagcaagctggtacgattgtaatacgactcactatagggcgaattgagcgctgtttaaacgctcttcaactggaagagcggttacgctgtttaaacgctcttcaactggaagagcggttactaccggttcactagctagctgctaatcgagctagttaccctatgaggtgacatgaagcgctcacggttactatgacggttagcttcacgactgttggtggcagtagcgtacgacttagctatagttccggacttacccttaagcgatttaaatctgcggttaccgaattcgagctcggtaccctgggatctgcccttactttaacgcctctaaccaacacccctttatctttataaggaacaataaacagaatttgccccactgttctaaatcacctaataatatccccagctaaaaacaataaaggtttcctagaattaagacaagcatgactgttcctccaggagggtttggaacattgttgcagtcttgcagatacgggcgaagggtgagaaacagagcggagggctggaggtgacctcggtagtcgacgccggagttgagcttgacaacgacggggcggcccctgatggacttgaggaagtccgatggcgtcttcaccgtcccgccggcgcccgaggcgggcctgtcgctgccgccgccgccgctgctcatcttgcgcgctgtgcccccggcggtgtccctgtgttgcggatcgcgggtgggccaggtggatgcgagggcgacccgtttggactccggccggagccgccggatccctggtcggtgtcagtgccgtttactctgggccccacgtgtcagtaccgtctgtagatgacaacaacccgtcgtccacagtcatgtccaaaatatcctttcttcttttttttcgattcggatatctatcttccttttttttttccaaaaatcttcttgacgcaccagcgcgcacgtttgtggtaaacgccgacacgtcggtcccacgtcgatagaccccacccaccagtgagtagcgtgtacgtattcgggggtgacggacgtgtcgccgtcgtcttgctagtcccattcccatctgagccacacatctctgaacaaaaaaaaggagggaggcctccacgcacatccccctccgtgccacccgccccaaaccctcgcgccgcctccgagacagccgccgcaaccatggccaccgccgccgccgcgtctaccgcgctcactggcgccactaccgctgcgcccaaggcgaggcgccgggcgcacctcctggccacccgccgcgccctcgccgcgcccatcaggtgctcagcggcgtcacccgccatgccgatggctcccccggccaccccgctccggccgtggggccccaccgagccccgcaagggtgctgacatcctcgtcgagtccctcgagcgctgcggcgtccgcgacgtaagtttctgcttctacctttgatatatatataataattatcattaattagtagtaatataatatttcaaatatttttttcaaaataaaagaatgtagtatatagcaattgcttttctgtagtttataacttcgtatagcatacattatacgaagttatacttttctaatatatgaccaaaatttgttaccgaattcaggcgacccatcgctgctttgtctacatcatgttcttcatcatcctccccaggcgacgcgtgctgctgttcttattcagactaccgttcgagtgactgcatggcgtacatctttctgcatcgactttgtacggctacatcgaacatatacacgagatgtctcgtgtgaatagagtcactaatgccttaagcatcggttactccgtagggtacattctgttcttcttatttgtgcatatttttattgttgtttactgattatacgagtagttatacatacatgcacatacatatcatcacatatatcacaatatttttctaaattaaattaaaactaaaaatgactaaatttctaacaccaacgacattgtaatgttttctccaacaactttacctattctacattgttctatttcgaatttcactctataaacaacatagtctacaatggaaaacagtgctttgtacgactatatacgcgatgtgtggctacaacataagacaatatagtcgtttgaagattgaacctatatatcggtacggttaatccgtctatgtacgtgggcatgacgaacacccgtgataacgaaggattaacgtgcacaatcataaatccaaagtaggagcggtgcatgatgagaatcgctctcagtactcgacataatgaaccttacgaggtacaacaggcaggcaggcagggaccaggggccgcctttatttcaggctcgctggccccacgggcgtgctgcgtgcacgaagggcactaccccaacctctcaccgaaaaccgcgctggatcggcaaatcaaacgaggtggtgccccgtgcccactctccacgtccacggcaccatccctctgcagccgctcaccagccatgccgtgtcgcggaacggcacaaccacccccaacccactcacgaaaccccgtcccggccgtgcccgtgtcggtccgcgctcggcaacgaggcggcccgcgctgctgagtcccctggacacccgacaccctgtcggccctttgtttattcatcccgaaatctcatctgcccccacggccgactgcgctgcgccgcccggatatatatacccatcgttatcgatcgactggggactctatcagtgatagagtctagaggatcgctcaggaaggccgctgagatagaggcatggcggccaatgcgggcggcggtggagcgggaggaggcagcggcagcggcagcgtggctgcgccggcggtgtgccgccccagcggctcgcggtggacgccgacgccggagcagatcaggatgctgaaggagctctactacggctgcggcatccggtcgcccagctcggagcagatccagcgcatcaccgccatgctgcggcagcacggcaagatcgagggcaagaacgtcttctactggttccagaaccacaaggcccgcgagcgccagaagcgccgcctcaccagcctcgacgtcaacgtgcccgccgccggcgcggccgacgccaccaccagccaactcggcgtcctctcgctgtcgtcgccgccgccttcaggcgcggcgcctccctcgcccaccctcggcttctacgccgccggcaatggcggcggatcggctgtgctgctggacacgagttccgactggggcagcagcggcgctgccatggccaccgagacatgcttcctgcaggactacatgggcgtgacggacacgggcagctcgtcgcagtggccacgcttctcgtcgtcggacacgataatggcggcggccgcggcgcgggcggcgacgacgcgggcgcccgagacgctccctctcttcccgacctgcggcgacgacggcggcagcggtagcagcagctacttgccgttctggggtgccgcgtccacaactgccggcgccacttcttccgttgcgatccagcagcaacaccagctgcaggagcagtacagcttttacagcaacagcaacagcacccagctggccggcaccggcaaccaagacgtatcggcaacagcagcagcagccgccgccctggagctgagcctcagctcatggtgctccccttaccctgctgcagggagtatgtgagagcaacgcgagctgccactgctcttcactggtaccgttaacagatcattcgacaaagcagcattagtccgttgatcggtggaagaccactcgtcagtgttgagttgaatgtttgatcaataaaatacggcaatgctgtaagggttgttttttatgccattgataatacactgtactgttcagttgttgaactctatttcttagccatgccaagtgcttttcttattttgaataacattacagcaaaaagttgaaagacaaaaaaaaaaacccccgaacagagtgctttgggtcccaagcttctttagactgtgttcggcgttccccctaaatttctccccctatatctcactcacttgtcacatcagcgttctctttccccctatatctccacgctctacagcagttccacctatatcaaacctctataccccaccacaacaatattatatactttcatcttcaactaactcatgtaccttccaatttttttctactaataattatttacgtgcacagaaacttagcaaggagagagagagcggggtgacccaccttgctagttggatattacctcttctcttcaaagtatccttgaacgctcaccggttatcaaatctctacactatagctctgtagtcttgctagatagttagttctttagctctcggtgaccaagcttggcgcgatcaagcttatcgataccgtcgacctcgaagcttggtcacccggtccgggcctagaaggccagcttcaagtttgtacaaaaaagcaggctccggccagaatggcccggaccgggttaccgaattcttaccctagctccctgcggctgttacgcggtcccccatcaatcttctgttcttgcggttgtagcctgtgtaacagtgctagagtatgtatgataaataggttttaagtctgcttacatgacattttttattgtggaagagacatataaaaattagagagagtggttctcatgcaacggcggacggcccggtgctaaaagagcttcaagacaaaataatgaaacaggaagagagtagatttatctaagagccaactttattatatgaatgtgtttattgttggctttagatgatatggtaaggagttagagctaataatagataggctctattattattattattaattaaactcgctctaaggaggaaagtgggaggaagggacgaggacgaagactactggaagcatcgtgcatggatgatggatgtggtgtctcttaatgtaggtggccggaggatgtacgtgttaattgcgcgataagcactcagatccaaccgcaaactacctccacactgacacactgatagagagaaagagagacctccgacgactgccgccgcagatgagccacgtacgtatacgacgtctgccggccggctcaggctgccgccatcaccctgctcgaaagtcgcgttaggcggcgccagctacataggagtatctagtctagccagttagtatactactactgcgctgatgatgaattaactctgcatagatactgtacttgcctccctccaacacccaaccacctcctgctcggctcttaataacttggacacggatcgatgccatccaaggaagaacacgacgacgacgacggaacatccaccatgcaagcttgcatccatacgccgatacgcgtgcatccatccatccaccattatttccattttccaccgatcacacgtacacaggcctatttaaggagcgacatcccactgcaactctcctcaccactcatcaccagctagctctagcaaagcacttgccatctaccgaccgccgcattccaaacagcccgacgagctagcagagcggcaggcacctccctcctcaaggaacccatggccactgtgaacaactggctcgctttctccctctccccgcaggagctgccgccctcccagacgacggactccacactcatctcggccgccaccgccgaccatgtctccggcgatgtctgcttcaacatcccccaagattggagcatgaggggatcagagctttcggcgctcgtcgcggagccgaagctggaggacttcctcggcggcatctccttctccgagcagcatcacaaggccaactgcaacatgatacccagcactagcagcacagtttgctacgcgagctcaggtgctagcaccggctaccatcaccagctgtaccaccagcccaccagctcagcgctccacttcgcggactccgtaatggtggcttcctcggccggtgtccacgacggcggtgccatgctcagcgcggccgccgctaacggtgtcgctggcgctgccagtgccaacggcggcggcatcgggctgtccatgattaagaactggctgcggagccaaccggcgcccatgcagccgagggtggcggcggctgagggcgcgcaggggctctctttgtccatgaacatggcggggacgacccaaggcgctgctggcatgccacttctcgctggagagcgcgcacgggcgcccgagagtgtatcgacgtcagcacagggtggagccgtcgtcgtcacggcgccgaaggaggatagcggtggcagcggtgttgccggcgctctagtagccgtgagcacggacacgggtggcagcggcggcgcgtcggctgacaacacggcaaggaagacggtggacacgttcgggcagcgcacgtcgatttaccgtggcgtgacaaggcatagatggactgggagatatgaggcacatctttgggataacagttgcagaagggaagggcaaactcgtaagggtcgtcaagtctatttaggtggctatgataaagaggagaaagctgctagggcttatgatcttgctgctctgaagtactggggtgccacaacaacaacaaattttccagtgagtaactacgaaaaggagctcgaggacatgaagcacatgacaaggcaggagtttgtagcgtctctgagaaggaagagcagtggtttctccagaggtgcatccatttacaggggagtgactaggcatcaccaacatggaagatggcaagcacggattggacgagttgcagggaacaaggatctttacttgggcaccttcagcacccaggaggaggcagcggaggcgtacgacatcgcggcgatcaagttccgcggcctcaacgccgtcaccaacttcgacatgagccgctacgacgtgaagagcatcctggacagcagcgccctccccatcggcagcgccgccaagcgcctcaaggaggccgaggccgcagcgtccgcgcagcaccaccacgccggcgtggtgagctacgacgtcggccgcatcgcctcgcagctcggcgacggcggagccctggcggcggcgtacggcgcgcactaccacggcgccgcctggccgaccatcgcgttccagccgggcgccgccagcacaggcctgtaccacccgtacgcgcagcagccaatgcgcggcggcgggtggtgcaagcaggagcaggaccacgcggtgatcgcggccgcgcacagcctgcaggacctccaccacctgaacctgggcgcggccggcgcgcacgactttttctcggcagggcagcaggccgccgccgctgcgatgcacggcctgggtagcatcgacagtgcgtcgctcgagcacagcaccggctccaactccgtcgtctacaacggcggggtcggcgacagcaacggcgccagcgccgtcggcggcagtggcggtggctacatgatgccgatgagcgctgccggagcaaccactacatcggcaatggtgagccacgagcaggtgcatgcacgggcctacgacgaagccaagcaggctgctcagatggggtacgagagctacctggtgaacgcggagaacaatggtggcggaaggatgtctgcatgggggactgtcgtgtctgcagccgcggcggcagcagcaagcagcaacgacaacatggccgccgacgtcgggcatggcggcgcgcagctcttcagtgtctggaacgacacttaagcgtacctagtggtacctgacatcttatagtctgcaacctctcgtgtctgaattcctatctttatcaagtgttattgcttccacgactataggacagctttcgtcgaaagcttttgctcatgtgatctcgaaggattcatctagtctgatttttcgtgacttgtatcggttttattggattcatccaacatatatcaataaaaaatgagttgtgtttcctttcttcctagttcagttaaaattatttccctcctgcgcttgtgctgtaattgtctgtgtacctgttgtttgtgactgtgttagttcccttggatatgatttcgtatttgatatgtacatggagatagcttagcttcattattggagtatgaagttagtatgacatagtcactctcctggaaaattgacactgcaaaccatatttttattctgaaccacaaatcctagtcagtccgctggcatatgccgtccgtttgctgaatccagaacgtgggtttggagatgtacggctgagatgcctctatgcgaaggggatttcgtggtgaaacgagatgggagtagagcaacgcccgtggaagatgcttcaaacttccacacttttgagcaacgatcggcagtagtaaggtagacgatttcaagatcaaagcatatgaagataaacaacatcaacaacaaaatttgttggggttctatagagagaaacagagctacatacatacactgttttgtatctaccatctgagatgatgaaaagatgaaaaactaaagaatgccccggcgccaacgccaggacacgccgcgcgcgcgtcacccgagccatctcttgacccagccggcgctgtatatttacacacgttgcagcatcgatcaccacctgttcgatcgcgtcgccgtcaccgggatctgagtcgaaacctagacttgtccatcttctggattggccaacttaattaatgtatgaaataaaaggatgcacacatagtgacatgctaatcactataatgtgggcatcaaagttgtgtgttatgtgtaattactagttatctgaataaaagagaaagagatcatccatatttcttatcctaaatgaatgtcacgtgtctttataattctttgatgaaccagatgcatttcattaaccaaatccatatacatataaatattaatcatatataattaatatcaattgggttagcaaaacaaatctagtctaggtgtgttttgcgaatgcgaccttcttatgtgcttctagtctccaaatgtggttgatagttattttgctctaagatcaacagtaatgaagtataaatcatcgttgtggtgtgctactcggttaattgagcattaacacacacaaacatgacgaggatggtataatctccaaaaatgtgtactttgttaggtgggaccctatagccttgattaatgtgctatgttaggcatgcctggaaacgtgtgacgcatatgttttgtgaacctgttgatattatatgtgcttttatattaccatattttattaaaatactaatatttattactagtaagatataacattctatctagcttaaaaactaaccataaatattccataataactagatttaccaaactaatatactaaatatacataataaatacaaaattaacaagacaataatcaatatttatgagcttaatatatttagacattatggttggtcgacgataatcatgctaacttttcgtaattgcttgattgaaatatgcttagaataatgcctctttgttctacatggcaaatagggaccattatggtgtaacaccctgggaaccacaaacaccccgaaatgctactaaactacacaactaaccttcatatataaaatttcgacagcatctcctttgaaaatttgcatagacgtggaagcaacagagtataaacagatatcatgataagaaaacatactagacattaataatctgctagaaatgggaagaatcctaacttgacgactgcgtaactgactagagtcacacttagctgaccctagtcacttacaactgacttcgtgtcctagatcgatgggccctggccgaagcttggtcacccggtccgggcctagaaggccagcttcaagtttgtaccctggagcttgccgagtgccatccttggacactcgataaagtatattttattttttttattttgccaaccaaactttttgtggtatgttcctacactatgtagatctacatgtaccattttggcacaattacatatttacaaaaatgttttctataaatattagatttagttcgtttatttgaatttcttcggaaaattcacatttaaactgcaagtcactcgaaacatggaaaaccgtgcatgcaaaataaatgatatgcatgttatctagcacaagttacgaccgatttcagaagcagaccagaatcttcaagcaccatgctcactaaacatgaccgtgaacttgttatctagttgtttaaaaattgtataaaacacaaataaagtcagaaattaatgaaacttgtccacatgtcatgatatcatatatagaggttgtgataaaaatttgataatgtttcggtaaagttgtgacgtactatgtgtagaaacctaagtgacctacacataaaatcatagagtttcaatgtagttcactcgacaaagactttgtcaagtgtccgataaaaagtactcgacaaagaagccgttgtcgatgtactgttcgtcgagatctctttgtcgagtgtcacactaggcaaagtctttacggagtgtttttcaggctttgacactcggcaaagcgctcgattccagtagtgacagtaatttgcatcaaaaatagctgagagatttaggccccgtttcaatctcacgggataaagtttagcttcctgctaaactttagctatatgaattgaagtgctaaagtttagtttcaattaccaccattagctctcctgtttagattacaaatggctaaaagtagctaaaaaatagctgctaaagtttatctcgcgagattgaaacagggccttaaaatgagtcaactaatagaccaactaattattagctattagtcgttagcttctttaatctaagctaaaaccaactaatagcttatttgttgaattacaattagctcaacggaattctctgtttttctaaaaaaaaactgcccctctcttacagcaaattgtccgctgcccgtcgtccagatacaatgaacgtacctagtaggaactcttttacacgctcggtcgctcgccgcggatcggagtccccggaacacgacaccactgtggaacacgacaaagtctgctcagaggcggccacaccctggcgtgcaccgagccggagcccggataagcacggtaaggagagtacggcgggacgtggcgacccgtgtgtctgctgccacgcagccttcctccacgtagccgcgcggccgcgccacgtaccagggcccggcgctggtataaatgcgcgccacctccgctttagttctgcatacagccaacccaaggatgtccaacctgctcacggttcaccagaaccttccggctcttccagtggacgcgacgtccgatgaagtcaggaagaacctcatggacatgttccgcgacaggcaagcgttcagcgagcacacctggaagatgctgctctccgtctgccgctcctgggctgcatggtgcaagctgaacaacaggaagtggttccccgctgagcccgaggacgtgagggattaccttctgtacctgcaagcgcgaggtttgtttctgcttctacctttgatatatatataataattatcattaattagtagtaatataatatttcaaatatttttttcaaaataaaagaatgtagtatatagcaattgcttttctgtagtttataagtgtgtatattttaatttataacttttctaatatatgaccaaaacatggtgatgcctaggtctggcagtgaagaccatccagcaacaccttggacaactgaacatgcttcacaggcgctccggcctcccgcgccccagcgactcgaacgccgtgagcctcgtcatgcgccgcatcaggaaggaaaacgtcgatgccggcgaaagggcaaagcaggccctcgcgttcgagaggaccgatttcgaccaggtccgcagcctgatggagaacagcgacaggtgccaggacattaggaacctggcgttcctcggaattgcatacaacacgctcctcaggatcgcggaaattgcccgcattcgcgtgaaggacattagccgcaccgacggcggcaggatgcttatccacattggcaggaccaagacgctcgtttccaccgcaggcgtcgaaaaggccctcagcctcggagtgaccaagctcgtcgaacgctggatctccgtgtccggcgtcgcggacgacccaaacaactacctcttctgccgcgtccgcaagaacggggtggctgcccctagcgccaccagccaactcagcacgagggccttggaaggtattttcgaggccacccaccgcctgatctacggcgcgaaggatgacagcggtcaacgctacctcgcatggtccgggcactccgcccgcgttggagctgctagggacatggcccgcgccggtgtttccatccccgaaatcatgcaggcgggtggatggacgaacgtgaacattgtcatgaactacattcgcaaccttgacagcgagacgggcgcaatggttcgcctcctggaagatggtgactgagctagacccagctttcttgtacaaagtggccgttaacggatccagacttgtccatcttctggattggccaacttaattaatgtatgaaataaaaggatgcacacatagtgacatgctaatcactataatgtgggcatcaaagttgtgtgttatgtgtaattactagttatctgaataaaagagaaagagatcatccatatttcttatcctaaatgaatgtcacgtgtctttataattctttgatgaaccagatgcatttcattaaccaaatccatatacatataaatattaatcatatataattaatatcaattgggttagcaaaacaaatctagtctaggtgtgttttgcgaattgcggcaagctgttaccgaattcctgcccttaaggccaattgttcaagattcattcaacaattgaaacatctcccatgattaaatcagtataaggttgctatggtcttgcttgacaaagtttttttttgagggaatttcaactaaatttttgagtgaaactatcaaatactgattttaaaaaatttttataaaaggaagcgcagagataaaaggccatctatgctacaaaagtacccaaaaatgtaatcctaaagtatgaattgcattttttttttgtttggacgaaaggaaaggagtattaccacaagaatgatatcatcttcatatttagatcttttttgggtaaagcttgagattctctaaatatagagaaatcagaagaaaaaaaaaccgtgttttggtggttttgatttctagcctccacaataactttgacggcgtcgacaagtctaacggacaccaagcagcgaaccaccagcgccgagccaagcgaagcagacggccgagacgttgacaccttcggcgcggcatctctcgagagttccgctccggcgctccacctccaccgctggcggtttcttattccgttccgttccgcctcctgctctgctcctctccacaccacacggcacgaaaccgttacggcaccggcagcacccagcacgggagaggggattcctttcccaccgttccttccctttccgccccgccgctataaatagccagccccatccccagcttttttccccaatctcatctcctctctcctgttgttcggagcacacgcacaatccgatcgatccccaaatccccttcgtctctcctcgcgagcctcgtggatcccagcttcaaggtacggcgatcgatcatcccccctccttctctctaccttcttttctctagactacatcggatggcgatccatggttagggcctgctagtttcccttcctgttttgtcgatggctgcgaggcacaatagatctgatggcgttatgacggctaacttgtcatgttgttgcgatttatagtccctttaggagatcagtttaatttctcggatggttcgagatcggtggtccatggttagtaccctaagatccgcgctgttagggttcgtagatggaggcgacctgttctgattgttaacttgtcagtacctgggaaatcctgggatggttctagctcgtccgcagatgagatcgatttcatgatcctctgtatcttgtttcgttgcctaggttccgtctaatctatccgtggtatgatgtagatgttttgatcgtgctaactacgtcttgtaaagttaattgtcaggtcataatttttagcatgcctttttttttgtttggttttgtctaattgggctgtcgttctagatcagagtagaagactgttccaaactacctgctggatttattgaacttggatctgtatgtgtgtcacatatcttcataaattcatgattaagatggattgaaatatcttttatctttttggtatggatagttctatatgttggtgtggctttgttagatgtatacatgcttagatacatgaagcaacgtgctgctactgtttagtaattgctgttcatttgtctaataaacagataaggatatgtatttatgttgctgttggttttgctggtactttgttggatacaaatgcttcaatacagaaaacagcatgctgctacgatttaccatttatctaatcttatcatatgtctaatctaataaacaaacatgcttttaaattatcttcatatgcttggatgatggcatacacagcggctatgtgtggttttttaaatacccagcatcatgggcatgcatgacactgctttaatatgctttttatttgcttgagactgtttcttttgtttatactgaccctttagttcggtgactcttctgcaggtcgactttaacttagcctaggatccatggcccagtccaagcacggcctgaccaaggagatgaccatgaagtaccgcatggagggctgcgtggacggccacaagttcgtgatcaccggcgagggcatcggctaccccttcaagggcaagcaggccatcaacctgtgcgtggtggagggcggccccttgcccttcgccgaggacatcttgtccgccgccttcatgtacggcaaccgcgtgttcaccgagtacccccaggacatcgtcgactacttcaagaactcctgccccgccggctacacctgggaccgctccttcctgttcgaggacggcgccgtgtgcatctgcaacgccgacatcaccgtgagcgtggaggagaactgcatgtaccacgagtccaagttctacggcgtgaacttccccgccgacggccccgtgatgaagaagatgaccgacaactgggagccctcctgcgagaagatcatccccgtgcccaagcagggcatcttgaagggcgacgtgagcatgtacctgctgctgaaggacggtggccgcttgcgctgccagttcgacaccgtgtacaaggccaagtccgtgccccgcaagatgcccgactggcacttcatccagcacaagctgacccgcgaggaccgcagcgacgccaagaaccagaagtggcacctgaccgagcacgccatcgcctccggctccgccttgccctccggactcagatctcgatagggtaccaatggccagttaacagatccagctgctgctgttctagggttcacaagtctgcctatttgtcttccccaatggagctatggttgtctggtctggtccttggtcgtgtcccgtttcattgtgtactatttacctgtaatgtgtatccttaagtctggtttgatggtgtctgaaacgttttgctgtggtagagcagcatggaagaactataatgaataagtgatccctaatcattgtgtccaaattttgcttctgctatacccttttgtgctgtttcttatgttttgcttaaaaatttgatctgacaaacaaatttgtctaaattatgctcttgttctgactgtgtactgtacacatttgtattgctaccggtttggcacatagttttctctttgattgcagatcaaacccttctgattgcagattgcttggctatggctgatgtgctcactgttcttctttagcttgtatattgctgatggtggcttggctacggctgaaaaagttgctgctgcgccgacttggcaactgttgctccagtaatgctttgtcctctcttcctagccgccgacttggcacttggcagctgttgctcctgtaatgcgttgttatctcttatctcttgagatgtactatgattttgaggctgtttgacttgtgccagattgccagtgctgatgctatattatctcaggtttttatgctagtatatgttttactgtgtgctgcctgtgtcgagttacgtaatctattgaaccgctatgcgtgttgatgccctgttgttgcttgccagattgatgcccctgttgcttgcagcttgcaagctgtagtgaaatcctaaaattcgaaaccaaatctattctgaacttttgaagatctgtgatgtccggaagaaaagattcaaacagataaacgggactctccagaatctataaaataaatgatcgacaaacgctttgctttggtaggcttcctagttagttagcggaccgaagcttcggtccgggcctagaaggccagcttcggccgccccatttcaaatatttttttcaaaataaaagaatgtagtatatagcaattgcttttctgtagtttataacttcgtatagcatacattatacgaagttatacttttctaatatatgaccaaaatttgttgatgtgcaggtcttcgcctaccccggcggcgcgtccatggagatccaccaggcactcacccgctcccccgtcatcgccaaccacctcttccgccacgagcaaggggaggcctttgccgcctccggctacgcgcgctcctcgggccgcgtcggcgtctgcatcgccacctccggccccggcgccaccaacctagtctccgcgctcgccgacgcgctgctcgattccgtccccatggtcgccatcacgggacaggtggcgcgacgcatgattggcaccgacgccttccaggagacgcccatcgtcgaggtcacccgctccatcaccaagcacaactacctggtcctcgacgtcgacgacatcccccgcgtcgtgcaggaggctttcttcctcgcctcctctggtcgaccagggccggtgcttgtcgacatccccaaggacatccagcagcagatggcggtgcctgtctgggacaagcccatgagtctgcctgggtacattgcgcgccttcccaagccccctgcgactgagttgcttgagcaggtgctgcgtcttgttggtgaatcgcggcgccctgttctttatgtgggcggtggctgcgcagcatctggtgaggagttgcgacgctttgtggagctgactggaatcccggtcacaactactcttatgggcctcggcaacttccccagcgacgacccactgtctctgcgcatgctaggtatgcatgggacggtgtatgcaaattatgcagtggataaggccgatctgttgcttgcacttggtgtgcggtttgatgatcgcgtgacagggaagattgaggcttttgcaagcagggctaagattgtgcacgttgatattgatccggctgagattggcaagaacaagcagccacatgtgtccatctgtgcagatgttaagcttgctttgcagggcatgaatgctcttcttgaaggaagcacatcaaagaagagctttgactttggctcatggaacgatgagttggatcagcagaagagggaattcccccttgggtataaaacatctaatgaggagatccagccacaatatgctattcaggttcttgatgagctgacgaaaggcgaggccatcatcggcacaggtgttgggcagcaccagatgtgggcggcacagtactacacttacaagcggccaaggcagtggttgtcttcagctggtcttggggctatgggatttggtttgccggctgctgctggtgcttctgtggcaaacccaggtgtcactgttgttgacatcgatggagatggtagctttctcatgaacgttcaggagctagctatgatccgaattgagaacctcccagtgaaggtctttgtgctaaacaaccagcacctggggatggtggtgcagttggaggacaggttctataaggccaacagagcgcacacatacttgggaaacccagagaatgaaagtgagatatatccagatttcgtgacgatcgccaaagggttcaacattccagcggtccgtgtgacaaagaagaacgaagtccgcgcagcgataaagaagatgctcgagactccagggccgtacctcttggatataatcgtcccacaccaggagcatgtgttgcctatgatccctagtggtggggctttcaaggatatgatcctggatggtgatggcaggactgtgtactgatgactagctagtcagttaacagatctgccagatcctcggtgtacaaataacccgtcttatcctatgagacgggccggcgtcagtgtgttctggaggaatttttatgtcagagcctttttctttgtgtgcttgatgtagatgccaagggaagcttattggctgttgaagcttgatgcaaaataaattatggaactctgttttttgtttatctaataataactagcaaatatgcttccattgcattgaaactaacagccttttgtgtttccaagttttattttgtgacaatgtcatctatttcaattagttgtggaatcggaaacttgcaggactaacttggaaactccaatccctcagcatcctggactttttcctggtgtaatccatgtagatattattttaatcatcattttagttctggaggtttttccatctccggttttgctcccctttcttcaaaaaaaaaaaaaaaatgccgtaggcgccgcaacgcccacctgttgttcaaactcatgggcacgagtggctcgaagattttatacaacaattgctgtagtttcaccgttgctggtgaagaagcatttttttaaaaaaatatagtggtattcattttaattagtttagttgtgcagcgagcaaaatttggacatgctctgctcggaatctgatcgacctagacacagattagcagcagtagctttgtcatctgttccaagagttgcgatctgatagaagaaaaaaaaaccttcccttcaatgtaaaaccgaaactaacaagaaagaagcacagtgccgtttaggcaagtatggagtacgtattaagcatgtagaaggccatgcatgaaccactaacaagaaagaagcgcagtgccattcaggcaagcataagcatgtagattggcatgcatgaacaactaacagtagatcgtctctggtctgattagaagttttttgggaagccaagaaatcatgtacaactggttccatctcaaattccgtggcaaaaagaggcctaagcaacataaagctttccactggttgccatatatgatttgggcatttcactttgatcttaatgggccttgtaaagcccaagactcatgattatctttagttgatgctcttaattaggtgtgggcaaataattcaaactgtatgtacccgaccaaaaccaaagcaaaaataatcgaaccaaaccgaaaatttaaaaataaccgaatgaaaactaaatcctataactgaaagaactgaaaccgaatcaaaatatttaatgtaaccaaaaatatccgaaatataattatattgtcaaaaatattaataatttctagattaaataattaaaaatacttaaaaatttatataaaatagtaaaaatactcgaaaataaccacaaatattcaaaaacaaccgaaatatcccaaaatattcaaagcaaaataaccgaatggataccaaattttaaaaccgaaaaaactggaacaaaaccaaaatcgaaccaaaatttcaaaaatcgaataaatactaaactttagaacaaaaaaaaacgataaccgaatgtatacgaaccaaagccgaattagataaccgaacgtccaggactactcttaatctttccgccacttatgatttgggctattactttgtttataatgagccttttcaagctcaagttcatgattgtccgtgagatgagaaactgacttgttggattcgaaaccctagctagtattggttaatacttaatacataaatgacctgcattgacatcatcatccaagaaaataaaaattgtatgcttgagatatttagttttcctagctaggttttctttattttagtaccgaatctttaggtgtgccacgttaatttagacccattttttcatacttaccaactgagtctagtttaatcatgactataatcgtataaaatgattcagtcgacgtcattgcgaacgtatataaaatcatccaaattgacgtcattccaaagaggtaagcatgcttatctaagagtccgagcatactaaacaagacgacattttatttgcactccaaatcaaattttgtattgcctaaagaaaaacaatcaaactcaagtttcttaaaattaatttcattcaaactaatcactttcaatatctcacatattattcatgccatttctatttgtctaaacatgatttaaaaaaaaaagtaaaatacaaagattactatgcaaaaactctataaaaaaaaattcaaatttcttatttatttgtgacatcaaattttcaaaataatttttttaattatcggttgatccggtcagtcgataaaaacataaactttcagcgaccgttaaaactttcctactaccgatttagagaaaatcttagcttgaaacgtaattgtaacctgccttcatgcaagtcgcaagatatgtcatcctaagttgtatatgttttctcaaaagatgtatttacttgagaaaatacgtttcaacgttgatggacaaccaattaagaatcaagcacctttcgtaatcaatttaggcttatcgtctaaggtatactgatttacgacagttgactagacttataaggaacaaaataatagaatagtttctaaacacttcacctaatcatagagactaagatggtaattcgtaaacgacaaagcctagtgacactgtccattgtaaaattccacatcatattagtattaaacatatacatgtagtttcctgaacacatgtagtatcaaacacacttcgtggcttcttcctcgaaacctgcggccgctcattaattaagtcatctagttgaaggatcgctatcaactttgtatagaaaagttgggccgaattcgagctcggtacggccagaatggcccggaccgaagcttaccggtcaaccaatcaggatttctttgtagggtcgagagaaggaggaagtactctccatgccatgcacgccacagtattgaatgtttttggcatggtcatactagccgtgtgtctctgttccatttggccagccagctccaattatttggcatgatcatcctgtcatactagcagtagcagcgtcatcttcgccgctggccgccccctgcaggctgcagtgtcacacatgcctaatcctgcagtcctgccttttgccttccaaaccgtgtgagccttccgtgcgctcgtcaagtttatgggctgtatttttccgagaggagcctaatgggccaaaagcaaggccttttgggccaatcacgatgggccttaggacactttctaaggcaagaacatgaacctttttctttttctcatattgtcatctgcgtattgtttcatgaagttgctatgcaacgtcacctgaagttgtaaccaactccacgtcacctgaagttgtaaccaactccacgcatataatattggtcctattttgcagagcgtaggttctgttggatctacctgatcaatagttagcggctagtgtaaataaaatagatcctatgatccatctaagtttgaattttcatgtttaataatcagtatgtgactatttaaactaatcttatttgctaatgttttttcgatatagtttaaaggctgtagaatatacttgaacttaggcaaagtggtgaccgagatgatcaacacatcaatcaagacgttagaagccttgatgaaacattcacgagagacgagcaaggagtctaagacgctaagataaataaaacctagaccaaggcatgtggagaaataaagtcaaacaaatgctactcgacaacatccagcttgtccagtactgcaccagaccagcccagagacaaaaagttcaaaagcatgtaaaaagaacgcaacggtaacacaccagatgtgtccggtgctatgccctatgacataaccaacgccacaatgtgcacgatgtgctctagaatgtgaggccagacgcatccggtggcacaacgaacactttactcatctagggttatagagtggattgcaacatgacttggagatgacgacaacttaccgaacgtcacatttgacgacagatctccaatggccaataactgctggaaagccaatagatacgtcacatggacgcaccaaacgtgtttggtgtctatgtaaaatttgttgtgtatccccacgaccacatttacattgggggctatatatacccccttgctagccaaatagagggtggtagagtatgttgaaattgtaggagagtgtcaagacacttcatcaagtgctctaaccacacaaaaaacacttaacaaaagattagatgagcagcatagtgatttttgtgaattgcttatgctagttaaacacatttatttacccttgttgtaggttagggcctagtgtttagtgttgtttgcatagcgctcttaccactcatacactatttttgtacaccaggggcctgaagtcttacaccaatcgtgtttatggtgtgttcgtcaccgtgtgctaaaggaaacgaagcccacaaggaccgattcaggagaagccattttagagacacacttatgtgtagtcaagtcacatgatctattcatagagttattcgacctagagcttgacccttgtacgggaatttatgcgatgagctttaatgaggactaagaaagctaagatacaattaaacttattccgaaaccgacaattaaagacacttcttgggacggagggagtagctgacgttccgtaatgcatgcaagagaagtgaggagggccacgctagagaagagaagtacagaacggaatgagggacggtggcgcatgtccccgcaagatcctgagctgattctaaatcaagcatttgcttgaccaagtctatgcggcgcagagcccgcccgcgccctatgcttgctccggagctctcgttcgttccctgccgcggcagccatcgatcaccggccccaacgctagctttagcttcgcctatttacatacccgagcggagaagagaagagaagagaagcgatcgggattgtgggcgagtgcgtgcgttcgtgcagccacagacaggcgtccgggcacccctaggcgcgccatttaaatatggatcaccaccgcacgccgatggagaactcggcgtcctcgaagccgccgacgccggcgtccacgcccaactcgcgcctcgcatcggcgccgtcaccccgccactccgccacgccgccgcacgcgtccgcgccggcgtccgccccggcgccggcctcgcgcaccgtctacagcgaccgcttcatccccagccgcgccggatccaacctcgcgctcttcgacctcggcccctcgccctcgcccgccgccgccgccgcctcctcgtcctcctcccacgaggccggccccgcggcctcgtccggatctgcgcccgccgcggcgtcgccctactgcgcgctcctccgcgccgcgctcttcgggcccgacacgcccgaccgggtcgcgtcctcggccgccgcgtgctcgtcctcctcctcctccccggggctctcgcctgtgggcacccccgccaccgggaacatcttcagattcaagacggaggtgcgccggaacgccaagagggcgcttttttccggaggggaggaggaggaggacgccctgttccccggcattttcaccaccaggggcgcgggaccaaggaaggtcccgaggtcgccctacaaggtgctggatgcgcctgcgttgcaggacgacttctacctcaacctcgtcgattggtcttcacataacgtcctcgctgttgggttgggcaattgcgtttacctgtggaatgcatgcagcagcaaggtcaccaagctttgcgatttgggggtggatgacaacgtttgttctgtggggtgggcgcagcgcggcactcaccttgcagtaggaacaaatcaaggaaaagttcagatctgggatgcaactcgctgtaaaagaataaggacaatggaaagccatcgcatgcgtgtaggtgctcttgcatggagttcttcgttgctttcttctggaagccgtgacaagagcatcctccaccatgatatccgtgctcaagaagatcatgttagcaagcttaccgggcataaatctgaggtttgtggactcaagtggtcttatgacaatcgtcagcttgcatcgggtggcaatgacaacagactttttgtttggaatccacattcagtacagccagtactgaagtatactgagcacacagcagctgtcaaagctattgcctggtcacctcatctccatgggctgcttgcatctggtggaggaactgcagatagatgcatacgattttggaatacgaccacaaatgcacacttgagctgtgtggacactggcagccaggtctgcaatctcgcgtggtcaaagaatgtaaatgagcttgttagcacccacggctactctcagaaccaaataattgtttggagatatccaacaatgtcgaagcttgccactttgacagggcatacatacagagtattgtacttagctatttcccctgatggccagaccatagttactggtgctggtgatgaaacgctccggttttggaacgtgttcccctctccaaagtcccagagttctgatagtttaagttgtgtcggaggaacatctttcgttagaagctacatccggtgaatttaaatgcccgggcgatcgctcgaggcgtacctagtggtaccacatggttaacctagacttgtccatcttctggattggccaacttaattaatgtatgaaataaaaggatgcacacatagtgacatgctaatcactataatgtgggcatcaaagttgtgtgttatgtgtaattactagttatctgaataaaagagaaagagatcatccatatttcttatcctaaatgaatgtcacgtgtctttataattctttgatgaaccagatgcatttcattaaccaaatccatatacatataaatattaatcatatataattaatatcaattgggttagcaaaacaaatctagtctaggtgtgttttgcgaatgcggccgccaccgcggtggagctcgaattccggtccgggcctagaaggccagcttcaagtttgtacaaaaaagcaggctccggccagaatggcccggaccgggttaccgaattcgagctcggtaccctgggatccgatatcgatgggccctggccgaagcttggtcacccggtccgggcctagaaggccgatctcccgggcacccagctttcttgtacaaagtggccgttaacggatcggccagaatggcccggaccgaagcttgcatgcctgcagtgcagcgtgacccggtcgtgcccctctctagagataatgagcattgcatgtctaagttataaaaaattaccacatattttttttgtcacacttgtttgaagtgcagtttatctatctttatacatatatttaaactttactctacgaataatataatctatagtactacaataatatcagtgttttagagaatcatataaatgaacagttagacatggtctaaaggacaattgagtattttgacaacaggactctacagttttatctttttagtgtgcatgtgttctcctttttttttgcaaatagcttcacctatataatacttcatccattttattagtacatccatttagggtttagggttaatggtttttatagactaatttttttagtacatctattttattctattttagcctctaaattaagaaaactaaaactctattttagtttttttatttaataatttagatataaaatagaataaaataaagtgactaaaaattaaacaaataccctttaagaaattaaaaaaactaaggaaacatttttcttgtttcgagtagataatgccagcctgttaaacgccgtcgacgagtctaacggacaccaaccagcgaaccagcagcgtcgcgtcgggccaagcgaagcagacggcacggcatctctgtcgctgcctctggacccctctcgagagttccgctccaccgttggacttgctccgctgtcggcatccagaaattgcgtggcggagcggcagacgtgagccggcacggcaggcggcctcctcctcctctcacggcaccggcagctacgggggattcctttcccaccgctccttcgctttcccttcctcgcccgccgtaataaatagacaccccctccacaccctctttccccaacctcgtgttgttcggagcgcacacacacacaaccagatctcccccaaatccacccgtcggcacctccgcttcaaggtacgccgctcgtcctcccccccccccctctctaccttctctagatcggcgttccggtccatgcatggttagggcccggtagttctacttctgttcatgtttgtgttagatccgtgtttgtgttagatccgtgctgctagcgttcgtacacggatgcgacctgtacgtcagacacgttctgattgctaacttgccagtgtttctctttggggaatcctgggatggctctagccgttccgcagacgggatcgatttcatgattttttttgtttcgttgcatagggtttggtttgcccttttcctttatttcaatatatgccgtgcacttgtttgtcgggtcatcttttcatgcttttttttgtcttggttgtgatgatgtggtctggttgggcggtcgttctagatcggagtagaattctgtttcaaactacctggtggatttattaattttggatctgtatgtgtgtgccatacatattcatagttacgaattgaagatgatggatggaaatatcgatctaggataggtatacatgttgatgcgggttttactgatgcatatacagagatgctttttgttcgcttggttgtgatgatgtggtgtggttgggcggtcgttcattcgttctagatcggagtagaatactgtttcaaactacctggtgtatttattaattttggaactgtatgtgtgtgtcatacatcttcatagttacgagtttaagatggatggaaatatcgatctaggataggtatacatgttgatgtgggttttactgatgcatatacatgatggcatatgcagcatctattcatatgctctaaccttgagtacctatctattataataaacaagtatgttttataattattttgatcttgatatacttggatgatggcatatgcagcagctatatgtggatttttttagccctgccttcatacgctatttatttgcttggtactgtttcttttgtcgatgctcaccctgttgtttggtgttacttctgcaggtcgactttaacttagcctaggatccatggcctcctccgagaacgtcatcaccgagttcatgcgcttcaaggtgcgcatggagggcaccgtgaacggccacgagttcgagatcgagggcgagggcgagggccgcccctacgagggccacaacaccgtgaagctgaaggtgaccaagggcggccccctgcccttcgcctgggacatcctgtccccccagttccagtacggctccaaggtgtacgtgaagcaccccgccgacatccccgactacaagaagctgtccttccccgagggcttcaagtgggagcgcgtgatgaacttcgaggacggcggcgtggcgaccgtgacccaggactcctccctgcaggacggctgcttcatctacaaggtgaagttcatcggcgtgaacttcccctccgacggccccgtgatgcagaagaagaccatgggctgggaggcctccaccgagcgcctgtacccccgcgacggcgtgctgaagggcgagacccacaaggccctgaagctgaaggacggcggccactacctggtggagttcaagtccatctacatggccaagaagcccgtgcagctgcccggctactactacgtggacgccaagctggacatcacctcccacaacgaggactacaccatcgtggagcagtacgagcgcaccgagggccgccaccacctgttcctgtagggtaccacatggttaacctagacttgtccatcttctggattggccaacttaattaatgtatgaaataaaaggatgcacacatagtgacatgctaatcactataatgtgggcatcaaagttgtgtgttatgtgtaattactagttatctgaataaaagagaaagagatcatccatatttcttatcctaaatgaatgtcacgtgtctttataattctttgatgaaccagatgcatttcattaaccaaatccatatacatataaatattaatcatatataattaatatcaattgggttagcaaaacaaatctagtctaggtgtgttttgcgaatgcggccgccaccgcggtggagctcgaattccggtccgggcctagaaggccagcttcggccgccccgggcaactttattatacaaagttgatagatcctcatgtcttcatcgtaagcttaaacaggccagaatggcctctggattcagcggcctagaaggccgaagtacttggtcttcctagtcgagtagatcacattcaagcttggtcacccggtccgtcaatattctgattccgatgacttcgtaggttcctagctcaagccgctcgtgtccaagcgtcacttacgattagctaatgattacggcatctaggaccgactagtggcgcgccgactagctagctaaggtaccgagctcgaattcattccgattaatcgtggcctcttgctcttcaggatgaagagctatgtttaaacgtgcaagcgctactagacaattcagtacattaaaaacgtccgcaatgtgttattaagttgtctaagcgtcaatttgtttacaccacaatatatcctgcca

SEQ ID NO: 44 - DNA, 28427 bp, Artificial Sequence
  RX000014
gtttacccgccaatatatcctgtcaaacactgatagtttaaactgaaggcgggaaacgacaatctgatcatgagcggagaattaagggagtcacgttatgacccccgccgatgacgcgggacaagccgttttacgtttggaactgacagaaccgcaacgttgaaggagccactcagcaagctggtacgattgtaatacgactcactatagggcgaattgagcgctgtttaaacgctcttcaactggaagagcggttacgctgtttaaacgctcttcaactggaagagcggttactaccggttcactagctagctgctaatcgagctagttaccctatgaggtgacatgaagcgctcacggttactatgacggttagcttcacgactgttggtggcagtagcgtacgacttagctatagttccggacttacccttaagcgatttaaatctgcggttaccgaattcgagctcggtaccctgggatctgcccttactttaacgcctctaaccaacacccctttatctttataaggaacaataaacagaatttgccccactgttctaaatcacctaataatatccccagctaaaaacaataaaggtttcctagaattaagacaagcatgactgttcctccaggagggtttggaacattgttgcagtcttgcagatacgggcgaagggtgagaaacagagcggagggctggaggtgacctcggtagtcgacgccggagttgagcttgacaacgacggggcggcccctgatggacttgaggaagtccgatggcgtcttcaccgtcccgccggcgcccgaggcgggcctgtcgctgccgccgccgccgctgctcatcttgcgcgctgtgcccccggcggtgtccctgtgttgcggatcgcgggtgggccaggtggatgcgagggcgacccgtttggactccggccggagccgccggatccctggtcggtgtcagtgccgtttactctgggccccacgtgtcagtaccgtctgtagatgacaacaacccgtcgtccacagtcatgtccaaaatatcctttcttcttttttttcgattcggatatctatcttccttttttttttccaaaaatcttcttgacgcaccagcgcgcacgtttgtggtaaacgccgacacgtcggtcccacgtcgatagaccccacccaccagtgagtagcgtgtacgtattcgggggtgacggacgtgtcgccgtcgtcttgctagtcccattcccatctgagccacacatctctgaacaaaaaaaaggagggaggcctccacgcacatccccctccgtgccacccgccccaaaccctcgcgccgcctccgagacagccgccgcaaccatggccaccgccgccgccgcgtctaccgcgctcactggcgccactaccgctgcgcccaaggcgaggcgccgggcgcacctcctggccacccgccgcgccctcgccgcgcccatcaggtgctcagcggcgtcacccgccatgccgatggctcccccggccaccccgctccggccgtggggccccaccgagccccgcaagggtgctgacatcctcgtcgagtccctcgagcgctgcggcgtccgcgacgtaagtttctgcttctacctttgatatatatataataattatcattaattagtagtaatataatatttcaaatatttttttcaaaataaaagaatgtagtatatagcaattgcttttctgtagtttataacttcgtatagcatacattatacgaagttatacttttctaatatatgaccaaaatttgttaccgaattcaggcgacccatcgctgctttgtctacatcatgttcttcatcatcctccccaggcgacgcgtgctgctgttcttattcagactaccgttcgagtgactgcatggcgtacatctttctgcatcgactttgtacggctacatcgaacatatacacgagatgtctcgtgtgaatagagtcactaatgccttaagcatcggttactccgtagggtacattctgttcttcttatttgtgcatatttttattgttgtttactgattatacgagtagttatacatacatgcacatacatatcatcacatatatcacaatatttttctaaattaaattaaaactaaaaatgactaaatttctaacaccaacgacattgtaatgttttctccaacaactttacctattctacattgttctatttcgaatttcactctataaacaacatagtctacaatggaaaacagtgctttgtacgactatatacgcgatgtgtggctacaacataagacaatatagtcgtttgaagattgaacctatatatcggtacggttaatccgtctatgtacgtgggcatgacgaacacccgtgataacgaaggattaacgtgcacaatcataaatccaaagtaggagcggtgcatgatgagaatcgctctcagtactcgacataatgaaccttacgaggtacaacaggcaggcaggcagggaccaggggccgcctttatttcaggctcgctggccccacgggcgtgctgcgtgcacgaagggcactaccccaacctctcaccgaaaaccgcgctggatcggcaaatcaaacgaggtggtgccccgtgcccactctccacgtccacggcaccatccctctgcagccgctcaccagccatgccgtgtcgcggaacggcacaaccacccccaacccactcacgaaaccccgtcccggccgtgcccgtgtcggtccgcgctcggcaacgaggcggcccgcgctgctgagtcccctggacacccgacaccctgtcggccctttgtttattcatcccgaaatctcatctgcccccacggccgactgcgctgcgccgcccggatatatatacccatcgttatcgatcgactggggactctatcagtgatagagtctagaggatcgctcaggaaggccgctgagatagaggcatggcggccaatgcgggcggcggtggagcgggaggaggcagcggcagcggcagcgtggctgcgccggcggtgtgccgccccagcggctcgcggtggacgccgacgccggagcagatcaggatgctgaaggagctctactacggctgcggcatccggtcgcccagctcggagcagatccagcgcatcaccgccatgctgcggcagcacggcaagatcgagggcaagaacgtcttctactggttccagaaccacaaggcccgcgagcgccagaagcgccgcctcaccagcctcgacgtcaacgtgcccgccgccggcgcggccgacgccaccaccagccaactcggcgtcctctcgctgtcgtcgccgccgccttcaggcgcggcgcctccctcgcccaccctcggcttctacgccgccggcaatggcggcggatcggctgtgctgctggacacgagttccgactggggcagcagcggcgctgccatggccaccgagacatgcttcctgcaggactacatgggcgtgacggacacgggcagctcgtcgcagtggccacgcttctcgtcgtcggacacgataatggcggcggccgcggcgcgggcggcgacgacgcgggcgcccgagacgctccctctcttcccgacctgcggcgacgacggcggcagcggtagcagcagctacttgccgttctggggtgccgcgtccacaactgccggcgccacttcttccgttgcgatccagcagcaacaccagctgcaggagcagtacagcttttacagcaacagcaacagcacccagctggccggcaccggcaaccaagacgtatcggcaacagcagcagcagccgccgccctggagctgagcctcagctcatggtgctccccttaccctgctgcagggagtatgtgagagcaacgcgagctgccactgctcttcactggtaccgttaacagatcattcgacaaagcagcattagtccgttgatcggtggaagaccactcgtcagtgttgagttgaatgtttgatcaataaaatacggcaatgctgtaagggttgttttttatgccattgataatacactgtactgttcagttgttgaactctatttcttagccatgccaagtgcttttcttattttgaataacattacagcaaaaagttgaaagacaaaaaaaaaaacccccgaacagagtgctttgggtcccaagcttctttagactgtgttcggcgttccccctaaatttctccccctatatctcactcacttgtcacatcagcgttctctttccccctatatctccacgctctacagcagttccacctatatcaaacctctataccccaccacaacaatattatatactttcatcttcaactaactcatgtaccttccaatttttttctactaataattatttacgtgcacagaaacttagcaaggagagagagagcggggtgacccaccttgctagttggatattacctcttctcttcaaagtatccttgaacgctcaccggttatcaaatctctacactatagctctgtagtcttgctagatagttagttctttagctctcggtgaccaagcttggcgcgatcaagcttatcgataccgtcgacctcgaagcttggtcacccggtccgggcctagaaggccagcttcaagtttgtacaaaaaagcaggctccggccagaatggcccggaccgggttaccgaattcttaccctagctccctgcggctgttacgcggtcccccatcaatcttctgttcttgcggttgtagcctgtgtaacagtgctagagtatgtatgataaataggttttaagtctgcttacatgacattttttattgtggaagagacatataaaaattagagagagtggttctcatgcaacggcggacggcccggtgctaaaagagcttcaagacaaaataatgaaacaggaagagagtagatttatctaagagccaactttattatatgaatgtgtttattgttggctttagatgatatggtaaggagttagagctaataatagataggctctattattattattattaattaaactcgctctaaggaggaaagtgggaggaagggacgaggacgaagactactggaagcatcgtgcatggatgatggatgtggtgtctcttaatgtaggtggccggaggatgtacgtgttaattgcgcgataagcactcagatccaaccgcaaactacctccacactgacacactgatagagagaaagagagacctccgacgactgccgccgcagatgagccacgtacgtatacgacgtctgccggccggctcaggctgccgccatcaccctgctcgaaagtcgcgttaggcggcgccagctacataggagtatctagtctagccagttagtatactactactgcgctgatgatgaattaactctgcatagatactgtacttgcctccctccaacacccaaccacctcctgctcggctcttaataacttggacacggatcgatgccatccaaggaagaacacgacgacgacgacggaacatccaccatgcaagcttgcatccatacgccgatacgcgtgcatccatccatccaccattatttccattttccaccgatcacacgtacacaggcctatttaaggagcgacatcccactgcaactctcctcaccactcatcaccagctagctctagcaaagcacttgccatctaccgaccgccgcattccaaacagcccgacgagctagcagagcggcaggcacctccctcctcaaggaacccatggccactgtgaacaactggctcgctttctccctctccccgcaggagctgccgccctcccagacgacggactccacactcatctcggccgccaccgccgaccatgtctccggcgatgtctgcttcaacatcccccaagattggagcatgaggggatcagagctttcggcgctcgtcgcggagccgaagctggaggacttcctcggcggcatctccttctccgagcagcatcacaaggccaactgcaacatgatacccagcactagcagcacagtttgctacgcgagctcaggtgctagcaccggctaccatcaccagctgtaccaccagcccaccagctcagcgctccacttcgcggactccgtaatggtggcttcctcggccggtgtccacgacggcggtgccatgctcagcgcggccgccgctaacggtgtcgctggcgctgccagtgccaacggcggcggcatcgggctgtccatgattaagaactggctgcggagccaaccggcgcccatgcagccgagggtggcggcggctgagggcgcgcaggggctctctttgtccatgaacatggcggggacgacccaaggcgctgctggcatgccacttctcgctggagagcgcgcacgggcgcccgagagtgtatcgacgtcagcacagggtggagccgtcgtcgtcacggcgccgaaggaggatagcggtggcagcggtgttgccggcgctctagtagccgtgagcacggacacgggtggcagcggcggcgcgtcggctgacaacacggcaaggaagacggtggacacgttcgggcagcgcacgtcgatttaccgtggcgtgacaaggcatagatggactgggagatatgaggcacatctttgggataacagttgcagaagggaagggcaaactcgtaagggtcgtcaagtctatttaggtggctatgataaagaggagaaagctgctagggcttatgatcttgctgctctgaagtactggggtgccacaacaacaacaaattttccagtgagtaactacgaaaaggagctcgaggacatgaagcacatgacaaggcaggagtttgtagcgtctctgagaaggaagagcagtggtttctccagaggtgcatccatttacaggggagtgactaggcatcaccaacatggaagatggcaagcacggattggacgagttgcagggaacaaggatctttacttgggcaccttcagcacccaggaggaggcagcggaggcgtacgacatcgcggcgatcaagttccgcggcctcaacgccgtcaccaacttcgacatgagccgctacgacgtgaagagcatcctggacagcagcgccctccccatcggcagcgccgccaagcgcctcaaggaggccgaggccgcagcgtccgcgcagcaccaccacgccggcgtggtgagctacgacgtcggccgcatcgcctcgcagctcggcgacggcggagccctggcggcggcgtacggcgcgcactaccacggcgccgcctggccgaccatcgcgttccagccgggcgccgccagcacaggcctgtaccacccgtacgcgcagcagccaatgcgcggcggcgggtggtgcaagcaggagcaggaccacgcggtgatcgcggccgcgcacagcctgcaggacctccaccacctgaacctgggcgcggccggcgcgcacgactttttctcggcagggcagcaggccgccgccgctgcgatgcacggcctgggtagcatcgacagtgcgtcgctcgagcacagcaccggctccaactccgtcgtctacaacggcggggtcggcgacagcaacggcgccagcgccgtcggcggcagtggcggtggctacatgatgccgatgagcgctgccggagcaaccactacatcggcaatggtgagccacgagcaggtgcatgcacgggcctacgacgaagccaagcaggctgctcagatggggtacgagagctacctggtgaacgcggagaacaatggtggcggaaggatgtctgcatgggggactgtcgtgtctgcagccgcggcggcagcagcaagcagcaacgacaacatggccgccgacgtcgggcatggcggcgcgcagctcttcagtgtctggaacgacacttaagcgtacctagtggtacctgacatcttatagtctgcaacctctcgtgtctgaattcctatctttatcaagtgttattgcttccacgactataggacagctttcgtcgaaagcttttgctcatgtgatctcgaaggattcatctagtctgatttttcgtgacttgtatcggttttattggattcatccaacatatatcaataaaaaatgagttgtgtttcctttcttcctagttcagttaaaattatttccctcctgcgcttgtgctgtaattgtctgtgtacctgttgtttgtgactgtgttagttcccttggatatgatttcgtatttgatatgtacatggagatagcttagcttcattattggagtatgaagttagtatgacatagtcactctcctggaaaattgacactgcaaaccatatttttattctgaaccacaaatcctagtcagtccgctggcatatgccgtccgtttgctgaatccagaacgtgggtttggagatgtacggctgagatgcctctatgcgaaggggatttcgtggtgaaacgagatgggagtagagcaacgcccgtggaagatgcttcaaacttccacacttttgagcaacgatcggcagtagtaaggtagacgatttcaagatcaaagcatatgaagataaacaacatcaacaacaaaatttgttggggttctatagagagaaacagagctacatacatacactgttttgtatctaccatctgagatgatgaaaagatgaaaaactaaagaatgccccggcgccaacgccaggacacgccgcgcgcgcgtcacccgagccatctcttgacccagccggcgctgtatatttacacacgttgcagcatcgatcaccacctgttcgatcgcgtcgccgtcaccgggatctgagtcgaaacctagacttgtccatcttctggattggccaacttaattaatgtatgaaataaaaggatgcacacatagtgacatgctaatcactataatgtgggcatcaaagttgtgtgttatgtgtaattactagttatctgaataaaagagaaagagatcatccatatttcttatcctaaatgaatgtcacgtgtctttataattctttgatgaaccagatgcatttcattaaccaaatccatatacatataaatattaatcatatataattaatatcaattgggttagcaaaacaaatctagtctaggtgtgttttgcgaatgcgaccttcttatgtgcttctagtctccaaatgtggttgatagttattttgctctaagatcaacagtaatgaagtataaatcatcgttgtggtgtgctactcggttaattgagcattaacacacacaaacatgacgaggatggtataatctccaaaaatgtgtactttgttaggtgggaccctatagccttgattaatgtgctatgttaggcatgcctggaaacgtgtgacgcatatgttttgtgaacctgttgatattatatgtgcttttatattaccatattttattaaaatactaatatttattactagtaagatataacattctatctagcttaaaaactaaccataaatattccataataactagatttaccaaactaatatactaaatatacataataaatacaaaattaacaagacaataatcaatatttatgagcttaatatatttagacattatggttggtcgacgataatcatgctaacttttcgtaattgcttgattgaaatatgcttagaataatgcctctttgttctacatggcaaatagggaccattatggtgtaacaccctgggaaccacaaacaccccgaaatgctactaaactacacaactaaccttcatatataaaatttcgacagcatctcctttgaaaatttgcatagacgtggaagcaacagagtataaacagatatcatgataagaaaacatactagacattaataatctgctagaaatgggaagaatcctaacttgacgactgcgtaactgactagagtcacacttagctgaccctagtcacttacaactgacttcgtgtcctagatcgatgggccctggccgaagcttggtcacccggtccgggcctagaaggccagcttcaagtttgtaccctggagcttgccgagtgccatccttggacactcgataaagtatattttattttttttattttgccaaccaaactttttgtggtatgttcctacactatgtagatctacatgtaccattttggcacaattacatatttacaaaaatgttttctataaatattagatttagttcgtttatttgaatttcttcggaaaattcacatttaaactgcaagtcactcgaaacatggaaaaccgtgcatgcaaaataaatgatatgcatgttatctagcacaagttacgaccgatttcagaagcagaccagaatcttcaagcaccatgctcactaaacatgaccgtgaacttgttatctagttgtttaaaaattgtataaaacacaaataaagtcagaaattaatgaaacttgtccacatgtcatgatatcatatatagaggttgtgataaaaatttgataatgtttcggtaaagttgtgacgtactatgtgtagaaacctaagtgacctacacataaaatcatagagtttcaatgtagttcactcgacaaagactttgtcaagtgtccgataaaaagtactcgacaaagaagccgttgtcgatgtactgttcgtcgagatctctttgtcgagtgtcacactaggcaaagtctttacggagtgtttttcaggctttgacactcggcaaagcgctcgattccagtagtgacagtaatttgcatcaaaaatagctgagagatttaggccccgtttcaatctcacgggataaagtttagcttcctgctaaactttagctatatgaattgaagtgctaaagtttagtttcaattaccaccattagctctcctgtttagattacaaatggctaaaagtagctaaaaaatagctgctaaagtttatctcgcgagattgaaacagggccttaaaatgagtcaactaatagaccaactaattattagctattagtcgttagcttctttaatctaagctaaaaccaactaatagcttatttgttgaattacaattagctcaacggaattctctgtttttctaaaaaaaaactgcccctctcttacagcaaattgtccgctgcccgtcgtccagatacaatgaacgtacctagtaggaactcttttacacgctcggtcgctcgccgcggatcggagtccccggaacacgacaccactgtggaacacgacaaagtctgctcagaggcggccacaccctggcgtgcaccgagccggagcccggataagcacggtaaggagagtacggcgggacgtggcgacccgtgtgtctgctgccacgcagccttcctccacgtagccgcgcggccgcgccacgtaccagggcccggcgctggtataaatgcgcgccacctccgctttagttctgcatacagccaacccaaggatgtccaacctgctcacggttcaccagaaccttccggctcttccagtggacgcgacgtccgatgaagtcaggaagaacctcatggacatgttccgcgacaggcaagcgttcagcgagcacacctggaagatgctgctctccgtctgccgctcctgggctgcatggtgcaagctgaacaacaggaagtggttccccgctgagcccgaggacgtgagggattaccttctgtacctgcaagcgcgaggtttgtttctgcttctacctttgatatatatataataattatcattaattagtagtaatataatatttcaaatatttttttcaaaataaaagaatgtagtatatagcaattgcttttctgtagtttataagtgtgtatattttaatttataacttttctaatatatgaccaaaacatggtgatgcctaggtctggcagtgaagaccatccagcaacaccttggacaactgaacatgcttcacaggcgctccggcctcccgcgccccagcgactcgaacgccgtgagcctcgtcatgcgccgcatcaggaaggaaaacgtcgatgccggcgaaagggcaaagcaggccctcgcgttcgagaggaccgatttcgaccaggtccgcagcctgatggagaacagcgacaggtgccaggacattaggaacctggcgttcctcggaattgcatacaacacgctcctcaggatcgcggaaattgcccgcattcgcgtgaaggacattagccgcaccgacggcggcaggatgcttatccacattggcaggaccaagacgctcgtttccaccgcaggcgtcgaaaaggccctcagcctcggagtgaccaagctcgtcgaacgctggatctccgtgtccggcgtcgcggacgacccaaacaactacctcttctgccgcgtccgcaagaacggggtggctgcccctagcgccaccagccaactcagcacgagggccttggaaggtattttcgaggccacccaccgcctgatctacggcgcgaaggatgacagcggtcaacgctacctcgcatggtccgggcactccgcccgcgttggagctgctagggacatggcccgcgccggtgtttccatccccgaaatcatgcaggcgggtggatggacgaacgtgaacattgtcatgaactacattcgcaaccttgacagcgagacgggcgcaatggttcgcctcctggaagatggtgactgagctagacccagctttcttgtacaaagtggccgttaacggatccagacttgtccatcttctggattggccaacttaattaatgtatgaaataaaaggatgcacacatagtgacatgctaatcactataatgtgggcatcaaagttgtgtgttatgtgtaattactagttatctgaataaaagagaaagagatcatccatatttcttatcctaaatgaatgtcacgtgtctttataattctttgatgaaccagatgcatttcattaaccaaatccatatacatataaatattaatcatatataattaatatcaattgggttagcaaaacaaatctagtctaggtgtgttttgcgaattgcggcaagctgttaccgaattcctgcccttaaggccaattgttcaagattcattcaacaattgaaacatctcccatgattaaatcagtataaggttgctatggtcttgcttgacaaagtttttttttgagggaatttcaactaaatttttgagtgaaactatcaaatactgattttaaaaaatttttataaaaggaagcgcagagataaaaggccatctatgctacaaaagtacccaaaaatgtaatcctaaagtatgaattgcattttttttttgtttggacgaaaggaaaggagtattaccacaagaatgatatcatcttcatatttagatcttttttgggtaaagcttgagattctctaaatatagagaaatcagaagaaaaaaaaaccgtgttttggtggttttgatttctagcctccacaataactttgacggcgtcgacaagtctaacggacaccaagcagcgaaccaccagcgccgagccaagcgaagcagacggccgagacgttgacaccttcggcgcggcatctctcgagagttccgctccggcgctccacctccaccgctggcggtttcttattccgttccgttccgcctcctgctctgctcctctccacaccacacggcacgaaaccgttacggcaccggcagcacccagcacgggagaggggattcctttcccaccgttccttccctttccgccccgccgctataaatagccagccccatccccagcttttttccccaatctcatctcctctctcctgttgttcggagcacacgcacaatccgatcgatccccaaatccccttcgtctctcctcgcgagcctcgtggatcccagcttcaaggtacggcgatcgatcatcccccctccttctctctaccttcttttctctagactacatcggatggcgatccatggttagggcctgctagtttcccttcctgttttgtcgatggctgcgaggcacaatagatctgatggcgttatgacggctaacttgtcatgttgttgcgatttatagtccctttaggagatcagtttaatttctcggatggttcgagatcggtggtccatggttagtaccctaagatccgcgctgttagggttcgtagatggaggcgacctgttctgattgttaacttgtcagtacctgggaaatcctgggatggttctagctcgtccgcagatgagatcgatttcatgatcctctgtatcttgtttcgttgcctaggttccgtctaatctatccgtggtatgatgtagatgttttgatcgtgctaactacgtcttgtaaagttaattgtcaggtcataatttttagcatgcctttttttttgtttggttttgtctaattgggctgtcgttctagatcagagtagaagactgttccaaactacctgctggatttattgaacttggatctgtatgtgtgtcacatatcttcataaattcatgattaagatggattgaaatatcttttatctttttggtatggatagttctatatgttggtgtggctttgttagatgtatacatgcttagatacatgaagcaacgtgctgctactgtttagtaattgctgttcatttgtctaataaacagataaggatatgtatttatgttgctgttggttttgctggtactttgttggatacaaatgcttcaatacagaaaacagcatgctgctacgatttaccatttatctaatcttatcatatgtctaatctaataaacaaacatgcttttaaattatcttcatatgcttggatgatggcatacacagcggctatgtgtggttttttaaatacccagcatcatgggcatgcatgacactgctttaatatgctttttatttgcttgagactgtttcttttgtttatactgaccctttagttcggtgactcttctgcaggtcgactttaacttagcctaggatccatggcccagtccaagcacggcctgaccaaggagatgaccatgaagtaccgcatggagggctgcgtggacggccacaagttcgtgatcaccggcgagggcatcggctaccccttcaagggcaagcaggccatcaacctgtgcgtggtggagggcggccccttgcccttcgccgaggacatcttgtccgccgccttcatgtacggcaaccgcgtgttcaccgagtacccccaggacatcgtcgactacttcaagaactcctgccccgccggctacacctgggaccgctccttcctgttcgaggacggcgccgtgtgcatctgcaacgccgacatcaccgtgagcgtggaggagaactgcatgtaccacgagtccaagttctacggcgtgaacttccccgccgacggccccgtgatgaagaagatgaccgacaactgggagccctcctgcgagaagatcatccccgtgcccaagcagggcatcttgaagggcgacgtgagcatgtacctgctgctgaaggacggtggccgcttgcgctgccagttcgacaccgtgtacaaggccaagtccgtgccccgcaagatgcccgactggcacttcatccagcacaagctgacccgcgaggaccgcagcgacgccaagaaccagaagtggcacctgaccgagcacgccatcgcctccggctccgccttgccctccggactcagatctcgatagggtaccaatggccagttaacagatccagctgctgctgttctagggttcacaagtctgcctatttgtcttccccaatggagctatggttgtctggtctggtccttggtcgtgtcccgtttcattgtgtactatttacctgtaatgtgtatccttaagtctggtttgatggtgtctgaaacgttttgctgtggtagagcagcatggaagaactataatgaataagtgatccctaatcattgtgtccaaattttgcttctgctatacccttttgtgctgtttcttatgttttgcttaaaaatttgatctgacaaacaaatttgtctaaattatgctcttgttctgactgtgtactgtacacatttgtattgctaccggtttggcacatagttttctctttgattgcagatcaaacccttctgattgcagattgcttggctatggctgatgtgctcactgttcttctttagcttgtatattgctgatggtggcttggctacggctgaaaaagttgctgctgcgccgacttggcaactgttgctccagtaatgctttgtcctctcttcctagccgccgacttggcacttggcagctgttgctcctgtaatgcgttgttatctcttatctcttgagatgtactatgattttgaggctgtttgacttgtgccagattgccagtgctgatgctatattatctcaggtttttatgctagtatatgttttactgtgtgctgcctgtgtcgagttacgtaatctattgaaccgctatgcgtgttgatgccctgttgttgcttgccagattgatgcccctgttgcttgcagcttgcaagctgtagtgaaatcctaaaattcgaaaccaaatctattctgaacttttgaagatctgtgatgtccggaagaaaagattcaaacagataaacgggactctccagaatctataaaataaatgatcgacaaacgctttgctttggtaggcttcctagttagttagcggaccgaagcttcggtccgggcctagaaggccagcttcggccgccccatttcaaatatttttttcaaaataaaagaatgtagtatatagcaattgcttttctgtagtttataacttcgtatagcatacattatacgaagttatacttttctaatatatgaccaaaatttgttgatgtgcaggtcttcgcctaccccggcggcgcgtccatggagatccaccaggcactcacccgctcccccgtcatcgccaaccacctcttccgccacgagcaaggggaggcctttgccgcctccggctacgcgcgctcctcgggccgcgtcggcgtctgcatcgccacctccggccccggcgccaccaacctagtctccgcgctcgccgacgcgctgctcgattccgtccccatggtcgccatcacgggacaggtggcgcgacgcatgattggcaccgacgccttccaggagacgcccatcgtcgaggtcacccgctccatcaccaagcacaactacctggtcctcgacgtcgacgacatcccccgcgtcgtgcaggaggctttcttcctcgcctcctctggtcgaccagggccggtgcttgtcgacatccccaaggacatccagcagcagatggcggtgcctgtctgggacaagcccatgagtctgcctgggtacattgcgcgccttcccaagccccctgcgactgagttgcttgagcaggtgctgcgtcttgttggtgaatcgcggcgccctgttctttatgtgggcggtggctgcgcagcatctggtgaggagttgcgacgctttgtggagctgactggaatcccggtcacaactactcttatgggcctcggcaacttccccagcgacgacccactgtctctgcgcatgctaggtatgcatgggacggtgtatgcaaattatgcagtggataaggccgatctgttgcttgcacttggtgtgcggtttgatgatcgcgtgacagggaagattgaggcttttgcaagcagggctaagattgtgcacgttgatattgatccggctgagattggcaagaacaagcagccacatgtgtccatctgtgcagatgttaagcttgctttgcagggcatgaatgctcttcttgaaggaagcacatcaaagaagagctttgactttggctcatggaacgatgagttggatcagcagaagagggaattcccccttgggtataaaacatctaatgaggagatccagccacaatatgctattcaggttcttgatgagctgacgaaaggcgaggccatcatcggcacaggtgttgggcagcaccagatgtgggcggcacagtactacacttacaagcggccaaggcagtggttgtcttcagctggtcttggggctatgggatttggtttgccggctgctgctggtgcttctgtggcaaacccaggtgtcactgttgttgacatcgatggagatggtagctttctcatgaacgttcaggagctagctatgatccgaattgagaacctcccagtgaaggtctttgtgctaaacaaccagcacctggggatggtggtgcagttggaggacaggttctataaggccaacagagcgcacacatacttgggaaacccagagaatgaaagtgagatatatccagatttcgtgacgatcgccaaagggttcaacattccagcggtccgtgtgacaaagaagaacgaagtccgcgcagcgataaagaagatgctcgagactccagggccgtacctcttggatataatcgtcccacaccaggagcatgtgttgcctatgatccctagtggtggggctttcaaggatatgatcctggatggtgatggcaggactgtgtactgatgactagctagtcagttaacagatctgccagatcctcggtgtacaaataacccgtcttatcctatgagacgggccggcgtcagtgtgttctggaggaatttttatgtcagagcctttttctttgtgtgcttgatgtagatgccaagggaagcttattggctgttgaagcttgatgcaaaataaattatggaactctgttttttgtttatctaataataactagcaaatatgcttccattgcattgaaactaacagccttttgtgtttccaagttttattttgtgacaatgtcatctatttcaattagttgtggaatcggaaacttgcaggactaacttggaaactccaatccctcagcatcctggactttttcctggtgtaatccatgtagatattattttaatcatcattttagttctggaggtttttccatctccggttttgctcccctttcttcaaaaaaaaaaaaaaaatgccgtaggcgccgcaacgcccacctgttgttcaaactcatgggcacgagtggctcgaagattttatacaacaattgctgtagtttcaccgttgctggtgaagaagcatttttttaaaaaaatatagtggtattcattttaattagtttagttgtgcagcgagcaaaatttggacatgctctgctcggaatctgatcgacctagacacagattagcagcagtagctttgtcatctgttccaagagttgcgatctgatagaagaaaaaaaaaccttcccttcaatgtaaaaccgaaactaacaagaaagaagcacagtgccgtttaggcaagtatggagtacgtattaagcatgtagaaggccatgcatgaaccactaacaagaaagaagcgcagtgccattcaggcaagcataagcatgtagattggcatgcatgaacaactaacagtagatcgtctctggtctgattagaagttttttgggaagccaagaaatcatgtacaactggttccatctcaaattccgtggcaaaaagaggcctaagcaacataaagctttccactggttgccatatatgatttgggcatttcactttgatcttaatgggccttgtaaagcccaagactcatgattatctttagttgatgctcttaattaggtgtgggcaaataattcaaactgtatgtacccgaccaaaaccaaagcaaaaataatcgaaccaaaccgaaaatttaaaaataaccgaatgaaaactaaatcctataactgaaagaactgaaaccgaatcaaaatatttaatgtaaccaaaaatatccgaaatataattatattgtcaaaaatattaataatttctagattaaataattaaaaatacttaaaaatttatataaaatagtaaaaatactcgaaaataaccacaaatattcaaaaacaaccgaaatatcccaaaatattcaaagcaaaataaccgaatggataccaaattttaaaaccgaaaaaactggaacaaaaccaaaatcgaaccaaaatttcaaaaatcgaataaatactaaactttagaacaaaaaaaaacgataaccgaatgtatacgaaccaaagccgaattagataaccgaacgtccaggactactcttaatctttccgccacttatgatttgggctattactttgtttataatgagccttttcaagctcaagttcatgattgtccgtgagatgagaaactgacttgttggattcgaaaccctagctagtattggttaatacttaatacataaatgacctgcattgacatcatcatccaagaaaataaaaattgtatgcttgagatatttagttttcctagctaggttttctttattttagtaccgaatctttaggtgtgccacgttaatttagacccattttttcatacttaccaactgagtctagtttaatcatgactataatcgtataaaatgattcagtcgacgtcattgcgaacgtatataaaatcatccaaattgacgtcattccaaagaggtaagcatgcttatctaagagtccgagcatactaaacaagacgacattttatttgcactccaaatcaaattttgtattgcctaaagaaaaacaatcaaactcaagtttcttaaaattaatttcattcaaactaatcactttcaatatctcacatattattcatgccatttctatttgtctaaacatgatttaaaaaaaaaagtaaaatacaaagattactatgcaaaaactctataaaaaaaaattcaaatttcttatttatttgtgacatcaaattttcaaaataatttttttaattatcggttgatccggtcagtcgataaaaacataaactttcagcgaccgttaaaactttcctactaccgatttagagaaaatcttagcttgaaacgtaattgtaacctgccttcatgcaagtcgcaagatatgtcatcctaagttgtatatgttttctcaaaagatgtatttacttgagaaaatacgtttcaacgttgatggacaaccaattaagaatcaagcacctttcgtaatcaatttaggcttatcgtctaaggtatactgatttacgacagttgactagacttataaggaacaaaataatagaatagtttctaaacacttcacctaatcatagagactaagatggtaattcgtaaacgacaaagcctagtgacactgtccattgtaaaattccacatcatattagtattaaacatatacatgtagtttcctgaacacatgtagtatcaaacacacttcgtggcttcttcctcgaaacctgcggccgctcattaattaagtcatctagttgaaggatcgctatcaactttgtatagaaaagttgggccgaattcgagctcggtacggccagaatggcccggaccgaagcttaccggtcaaccaatcaggatttctttgtagggtcgagagaaggaggaagtactctccatgccatgcacgccacagtattgaatgtttttggcatggtcatactagccgtgtgtctctgttccatttggccagccagctccaattatttggcatgatcatcctgtcatactagcagtagcagcgtcatcttcgccgctggccgccccctgcaggctgcagtgtcacacatgcctaatcctgcagtcctgccttttgccttccaaaccgtgtgagccttccgtgcgctcgtcaagtttatgggctgtatttttccgagaggagcctaatgggccaaaagcaaggccttttgggccaatcacgatgggccttaggacactttctaaggcaagaacatgaacctttttctttttctcatattgtcatctgcgtattgtttcatgaagttgctatgcaacgtcacctgaagttgtaaccaactccacgtcacctgaagttgtaaccaactccacgcatataatattggtcctattttgcagagcgtaggttctgttggatctacctgatcaatagttagcggctagtgtaaataaaatagatcctatgatccatctaagtttgaattttcatgtttaataatcagtatgtgactatttaaactaatcttatttgctaatgttttttcgatatagtttaaaggctgtagaatatacttgaacttaggcaaagtggtgaccgagatgatcaacacatcaatcaagacgttagaagccttgatgaaacattcacgagagacgagcaaggagtctaagacgctaagataaataaaacctagaccaaggcatgtggagaaataaagtcaaacaaatgctactcgacaacatccagcttgtccagtactgcaccagaccagcccagagacaaaaagttcaaaagcatgtaaaaagaacgcaacggtaacacaccagatgtgtccggtgctatgccctatgacataaccaacgccacaatgtgcacgatgtgctctagaatgtgaggccagacgcatccggtggcacaacgaacactttactcatctagggttatagagtggattgcaacatgacttggagatgacgacaacttaccgaacgtcacatttgacgacagatctccaatggccaataactgctggaaagccaatagatacgtcacatggacgcaccaaacgtgtttggtgtctatgtaaaatttgttgtgtatccccacgaccacatttacattgggggctatatatacccccttgctagccaaatagagggtggtagagtatgttgaaattgtaggagagtgtcaagacacttcatcaagtgctctaaccacacaaaaaacacttaacaaaagattagatgagcagcatagtgatttttgtgaattgcttatgctagttaaacacatttatttacccttgttgtaggttagggcctagtgtttagtgttgtttgcatagcgctcttaccactcatacactatttttgtacaccaggggcctgaagtcttacaccaatcgtgtttatggtgtgttcgtcaccgtgtgctaaaggaaacgaagcccacaaggaccgattcaggagaagccattttagagacacacttatgtgtagtcaagtcacatgatctattcatagagttattcgacctagagcttgacccttgtacgggaatttatgcgatgagctttaatgaggactaagaaagctaagatacaattaaacttattccgaaaccgacaattaaagacacttcttgggacggagggagtagctgacgttccgtaatgcatgcaagagaagtgaggagggccacgctagagaagagaagtacagaacggaatgagggacggtggcgcatgtccccgcaagatcctgagctgattctaaatcaagcatttgcttgaccaagtctatgcggcgcagagcccgcccgcgccctatgcttgctccggagctctcgttcgttccctgccgcggcagccatcgatcaccggccccaacgctagctttagcttcgcctatttacatacccgagcggagaagagaagagaagagaagcgatcgggattgtgggcgagtgcgtgcgttcgtgcagccacagacaggcgtccgggcacccctaggcgcgccatttaaatatggaaagccatcgcatgcgtgtaggtgctcttgcatggagttcttcgttgctttcttctggaagccgtgacaagagcatcctccaccatgatatccgtgctcaagaagatcatgttagcaagcttaccgggcataaatctgaggtttgtggactcaagtggtcttatgacaatcgtcagcttgcatcgggtggcaatgacaacagacttttcgtttggaatccacattcagtacagccagtactgaagtatactgagcacacagcagctgtcaaagctattgcctggtcacctcatctccatgggctgcttgcatctggtggaggaactgcagatagatgcatacgattttggaatacgaccacaaatgcacacttgagctgtgtggacactggcagccaggtctgcaatcttgcgtggtcaaagaatgtaaatgagcttgttagcacccacggctactctcagaaccaaataattgtttggagatatccaacaatgtcgaagcttgccactttgacagggcatacatacagagtattgtacttagctatttcccctgatggccagaccatagttactggtgctggtgatgaaacgctccggttttggaacgtgttcccctctccaaagtcccagagttctgacagtttaagttgcgtcggaggaacatctttcgttagaagctacatccggtgaatttaaatgcccgggcgatcgctcgaggcgtacctagtggtaccacatggttaacctagacttgtccatcttctggattggccaacttaattaatgtatgaaataaaaggatgcacacatagtgacatgctaatcactataatgtgggcatcaaagttgtgtgttatgtgtaattactagttatctgaataaaagagaaagagatcatccatatttcttatcctaaatgaatgtcacgtgtctttataattctttgatgaaccagatgcatttcattaaccaaatccatatacatataaatattaatcatatataattaatatcaattgggttagcaaaacaaatctagtctaggtgtgttttgcgaatgcggccgccaccgcggtggagctcgaattccggtccgggcctagaaggccagcttcaagtttgtacaaaaaagcaggctccggccagaatggcccggaccgggttaccgaattcgagctcggtaccctgggatccgatatcgatgggccctggccgaagcttggtcacccggtccgggcctagaaggccgatctcccgggcacccagctttcttgtacaaagtggccgttaacggatcggccagaatggcccggaccgaagcttgcatgcctgcagtgcagcgtgacccggtcgtgcccctctctagagataatgagcattgcatgtctaagttataaaaaattaccacatattttttttgtcacacttgtttgaagtgcagtttatctatctttatacatatatttaaactttactctacgaataatataatctatagtactacaataatatcagtgttttagagaatcatataaatgaacagttagacatggtctaaaggacaattgagtattttgacaacaggactctacagttttatctttttagtgtgcatgtgttctcctttttttttgcaaatagcttcacctatataatacttcatccattttattagtacatccatttagggtttagggttaatggtttttatagactaatttttttagtacatctattttattctattttagcctctaaattaagaaaactaaaactctattttagtttttttatttaataatttagatataaaatagaataaaataaagtgactaaaaattaaacaaataccctttaagaaattaaaaaaactaaggaaacatttttcttgtttcgagtagataatgccagcctgttaaacgccgtcgacgagtctaacggacaccaaccagcgaaccagcagcgtcgcgtcgggccaagcgaagcagacggcacggcatctctgtcgctgcctctggacccctctcgagagttccgctccaccgttggacttgctccgctgtcggcatccagaaattgcgtggcggagcggcagacgtgagccggcacggcaggcggcctcctcctcctctcacggcaccggcagctacgggggattcctttcccaccgctccttcgctttcccttcctcgcccgccgtaataaatagacaccccctccacaccctctttccccaacctcgtgttgttcggagcgcacacacacacaaccagatctcccccaaatccacccgtcggcacctccgcttcaaggtacgccgctcgtcctcccccccccccctctctaccttctctagatcggcgttccggtccatgcatggttagggcccggtagttctacttctgttcatgtttgtgttagatccgtgtttgtgttagatccgtgctgctagcgttcgtacacggatgcgacctgtacgtcagacacgttctgattgctaacttgccagtgtttctctttggggaatcctgggatggctctagccgttccgcagacgggatcgatttcatgattttttttgtttcgttgcatagggtttggtttgcccttttcctttatttcaatatatgccgtgcacttgtttgtcgggtcatcttttcatgcttttttttgtcttggttgtgatgatgtggtctggttgggcggtcgttctagatcggagtagaattctgtttcaaactacctggtggatttattaattttggatctgtatgtgtgtgccatacatattcatagttacgaattgaagatgatggatggaaatatcgatctaggataggtatacatgttgatgcgggttttactgatgcatatacagagatgctttttgttcgcttggttgtgatgatgtggtgtggttgggcggtcgttcattcgttctagatcggagtagaatactgtttcaaactacctggtgtatttattaattttggaactgtatgtgtgtgtcatacatcttcatagttacgagtttaagatggatggaaatatcgatctaggataggtatacatgttgatgtgggttttactgatgcatatacatgatggcatatgcagcatctattcatatgctctaaccttgagtacctatctattataataaacaagtatgttttataattattttgatcttgatatacttggatgatggcatatgcagcagctatatgtggatttttttagccctgccttcatacgctatttatttgcttggtactgtttcttttgtcgatgctcaccctgttgtttggtgttacttctgcaggtcgactttaacttagcctaggatccatggcctcctccgagaacgtcatcaccgagttcatgcgcttcaaggtgcgcatggagggcaccgtgaacggccacgagttcgagatcgagggcgagggcgagggccgcccctacgagggccacaacaccgtgaagctgaaggtgaccaagggcggccccctgcccttcgcctgggacatcctgtccccccagttccagtacggctccaaggtgtacgtgaagcaccccgccgacatccccgactacaagaagctgtccttccccgagggcttcaagtgggagcgcgtgatgaacttcgaggacggcggcgtggcgaccgtgacccaggactcctccctgcaggacggctgcttcatctacaaggtgaagttcatcggcgtgaacttcccctccgacggccccgtgatgcagaagaagaccatgggctgggaggcctccaccgagcgcctgtacccccgcgacggcgtgctgaagggcgagacccacaaggccctgaagctgaaggacggcggccactacctggtggagttcaagtccatctacatggccaagaagcccgtgcagctgcccggctactactacgtggacgccaagctggacatcacctcccacaacgaggactacaccatcgtggagcagtacgagcgcaccgagggccgccaccacctgttcctgtagggtaccacatggttaacctagacttgtccatcttctggattggccaacttaattaatgtatgaaataaaaggatgcacacatagtgacatgctaatcactataatgtgggcatcaaagttgtgtgttatgtgtaattactagttatctgaataaaagagaaagagatcatccatatttcttatcctaaatgaatgtcacgtgtctttataattctttgatgaaccagatgcatttcattaaccaaatccatatacatataaatattaatcatatataattaatatcaattgggttagcaaaacaaatctagtctaggtgtgttttgcgaatgcggccgccaccgcggtggagctcgaattccggtccgggcctagaaggccagcttcggccgccccgggcaactttattatacaaagttgatagatcctcatgtcttcatcgtaagcttaaacaggccagaatggcctctggattcagcggcctagaaggccgaagtacttggtcttcctagtcgagtagatcacattcaagcttggtcacccggtccgtcaatattctgattccgatgacttcgtaggttcctagctcaagccgctcgtgtccaagcgtcacttacgattagctaatgattacggcatctaggaccgactagtggcgcgccgactagctagctaaggtaccgagctcgaattcattccgattaatcgtggcctcttgctcttcaggatgaagagctatgtttaaacgtgcaagcgctactagacaattcagtacattaaaaacgtccgcaatgtgttattaagttgtctaagcgtcaatttgtttacaccacaatatatcctgcca

SEQ ID NO: 45 - DNA, 29189 bp, Artificial Sequence
  RX000015
gtttacccgccaatatatcctgtcaaacactgatagtttaaactgaaggcgggaaacgacaatctgatcatgagcggagaattaagggagtcacgttatgacccccgccgatgacgcgggacaagccgttttacgtttggaactgacagaaccgcaacgttgaaggagccactcagcaagctggtacgattgtaatacgactcactatagggcgaattgagcgctgtttaaacgctcttcaactggaagagcggttacgctgtttaaacgctcttcaactggaagagcggttactaccggttcactagctagctgctaatcgagctagttaccctatgaggtgacatgaagcgctcacggttactatgacggttagcttcacgactgttggtggcagtagcgtacgacttagctatagttccggacttacccttaagcgatttaaatctgcggttaccgaattcgagctcggtaccctgggatctgcccttactttaacgcctctaaccaacacccctttatctttataaggaacaataaacagaatttgccccactgttctaaatcacctaataatatccccagctaaaaacaataaaggtttcctagaattaagacaagcatgactgttcctccaggagggtttggaacattgttgcagtcttgcagatacgggcgaagggtgagaaacagagcggagggctggaggtgacctcggtagtcgacgccggagttgagcttgacaacgacggggcggcccctgatggacttgaggaagtccgatggcgtcttcaccgtcccgccggcgcccgaggcgggcctgtcgctgccgccgccgccgctgctcatcttgcgcgctgtgcccccggcggtgtccctgtgttgcggatcgcgggtgggccaggtggatgcgagggcgacccgtttggactccggccggagccgccggatccctggtcggtgtcagtgccgtttactctgggccccacgtgtcagtaccgtctgtagatgacaacaacccgtcgtccacagtcatgtccaaaatatcctttcttcttttttttcgattcggatatctatcttccttttttttttccaaaaatcttcttgacgcaccagcgcgcacgtttgtggtaaacgccgacacgtcggtcccacgtcgatagaccccacccaccagtgagtagcgtgtacgtattcgggggtgacggacgtgtcgccgtcgtcttgctagtcccattcccatctgagccacacatctctgaacaaaaaaaaggagggaggcctccacgcacatccccctccgtgccacccgccccaaaccctcgcgccgcctccgagacagccgccgcaaccatggccaccgccgccgccgcgtctaccgcgctcactggcgccactaccgctgcgcccaaggcgaggcgccgggcgcacctcctggccacccgccgcgccctcgccgcgcccatcaggtgctcagcggcgtcacccgccatgccgatggctcccccggccaccccgctccggccgtggggccccaccgagccccgcaagggtgctgacatcctcgtcgagtccctcgagcgctgcggcgtccgcgacgtaagtttctgcttctacctttgatatatatataataattatcattaattagtagtaatataatatttcaaatatttttttcaaaataaaagaatgtagtatatagcaattgcttttctgtagtttataacttcgtatagcatacattatacgaagttatacttttctaatatatgaccaaaatttgttaccgaattcaggcgacccatcgctgctttgtctacatcatgttcttcatcatcctccccaggcgacgcgtgctgctgttcttattcagactaccgttcgagtgactgcatggcgtacatctttctgcatcgactttgtacggctacatcgaacatatacacgagatgtctcgtgtgaatagagtcactaatgccttaagcatcggttactccgtagggtacattctgttcttcttatttgtgcatatttttattgttgtttactgattatacgagtagttatacatacatgcacatacatatcatcacatatatcacaatatttttctaaattaaattaaaactaaaaatgactaaatttctaacaccaacgacattgtaatgttttctccaacaactttacctattctacattgttctatttcgaatttcactctataaacaacatagtctacaatggaaaacagtgctttgtacgactatatacgcgatgtgtggctacaacataagacaatatagtcgtttgaagattgaacctatatatcggtacggttaatccgtctatgtacgtgggcatgacgaacacccgtgataacgaaggattaacgtgcacaatcataaatccaaagtaggagcggtgcatgatgagaatcgctctcagtactcgacataatgaaccttacgaggtacaacaggcaggcaggcagggaccaggggccgcctttatttcaggctcgctggccccacgggcgtgctgcgtgcacgaagggcactaccccaacctctcaccgaaaaccgcgctggatcggcaaatcaaacgaggtggtgccccgtgcccactctccacgtccacggcaccatccctctgcagccgctcaccagccatgccgtgtcgcggaacggcacaaccacccccaacccactcacgaaaccccgtcccggccgtgcccgtgtcggtccgcgctcggcaacgaggcggcccgcgctgctgagtcccctggacacccgacaccctgtcggccctttgtttattcatcccgaaatctcatctgcccccacggccgactgcgctgcgccgcccggatatatatacccatcgttatcgatcgactggggactctatcagtgatagagtctagaggatcgctcaggaaggccgctgagatagaggcatggcggccaatgcgggcggcggtggagcgggaggaggcagcggcagcggcagcgtggctgcgccggcggtgtgccgccccagcggctcgcggtggacgccgacgccggagcagatcaggatgctgaaggagctctactacggctgcggcatccggtcgcccagctcggagcagatccagcgcatcaccgccatgctgcggcagcacggcaagatcgagggcaagaacgtcttctactggttccagaaccacaaggcccgcgagcgccagaagcgccgcctcaccagcctcgacgtcaacgtgcccgccgccggcgcggccgacgccaccaccagccaactcggcgtcctctcgctgtcgtcgccgccgccttcaggcgcggcgcctccctcgcccaccctcggcttctacgccgccggcaatggcggcggatcggctgtgctgctggacacgagttccgactggggcagcagcggcgctgccatggccaccgagacatgcttcctgcaggactacatgggcgtgacggacacgggcagctcgtcgcagtggccacgcttctcgtcgtcggacacgataatggcggcggccgcggcgcgggcggcgacgacgcgggcgcccgagacgctccctctcttcccgacctgcggcgacgacggcggcagcggtagcagcagctacttgccgttctggggtgccgcgtccacaactgccggcgccacttcttccgttgcgatccagcagcaacaccagctgcaggagcagtacagcttttacagcaacagcaacagcacccagctggccggcaccggcaaccaagacgtatcggcaacagcagcagcagccgccgccctggagctgagcctcagctcatggtgctccccttaccctgctgcagggagtatgtgagagcaacgcgagctgccactgctcttcactggtaccgttaacagatcattcgacaaagcagcattagtccgttgatcggtggaagaccactcgtcagtgttgagttgaatgtttgatcaataaaatacggcaatgctgtaagggttgttttttatgccattgataatacactgtactgttcagttgttgaactctatttcttagccatgccaagtgcttttcttattttgaataacattacagcaaaaagttgaaagacaaaaaaaaaaacccccgaacagagtgctttgggtcccaagcttctttagactgtgttcggcgttccccctaaatttctccccctatatctcactcacttgtcacatcagcgttctctttccccctatatctccacgctctacagcagttccacctatatcaaacctctataccccaccacaacaatattatatactttcatcttcaactaactcatgtaccttccaatttttttctactaataattatttacgtgcacagaaacttagcaaggagagagagagcggggtgacccaccttgctagttggatattacctcttctcttcaaagtatccttgaacgctcaccggttatcaaatctctacactatagctctgtagtcttgctagatagttagttctttagctctcggtgaccaagcttggcgcgatcaagcttatcgataccgtcgacctcgaagcttggtcacccggtccgggcctagaaggccagcttcaagtttgtacaaaaaagcaggctccggccagaatggcccggaccgggttaccgaattcttaccctagctccctgcggctgttacgcggtcccccatcaatcttctgttcttgcggttgtagcctgtgtaacagtgctagagtatgtatgataaataggttttaagtctgcttacatgacattttttattgtggaagagacatataaaaattagagagagtggttctcatgcaacggcggacggcccggtgctaaaagagcttcaagacaaaataatgaaacaggaagagagtagatttatctaagagccaactttattatatgaatgtgtttattgttggctttagatgatatggtaaggagttagagctaataatagataggctctattattattattattaattaaactcgctctaaggaggaaagtgggaggaagggacgaggacgaagactactggaagcatcgtgcatggatgatggatgtggtgtctcttaatgtaggtggccggaggatgtacgtgttaattgcgcgataagcactcagatccaaccgcaaactacctccacactgacacactgatagagagaaagagagacctccgacgactgccgccgcagatgagccacgtacgtatacgacgtctgccggccggctcaggctgccgccatcaccctgctcgaaagtcgcgttaggcggcgccagctacataggagtatctagtctagccagttagtatactactactgcgctgatgatgaattaactctgcatagatactgtacttgcctccctccaacacccaaccacctcctgctcggctcttaataacttggacacggatcgatgccatccaaggaagaacacgacgacgacgacggaacatccaccatgcaagcttgcatccatacgccgatacgcgtgcatccatccatccaccattatttccattttccaccgatcacacgtacacaggcctatttaaggagcgacatcccactgcaactctcctcaccactcatcaccagctagctctagcaaagcacttgccatctaccgaccgccgcattccaaacagcccgacgagctagcagagcggcaggcacctccctcctcaaggaacccatggccactgtgaacaactggctcgctttctccctctccccgcaggagctgccgccctcccagacgacggactccacactcatctcggccgccaccgccgaccatgtctccggcgatgtctgcttcaacatcccccaagattggagcatgaggggatcagagctttcggcgctcgtcgcggagccgaagctggaggacttcctcggcggcatctccttctccgagcagcatcacaaggccaactgcaacatgatacccagcactagcagcacagtttgctacgcgagctcaggtgctagcaccggctaccatcaccagctgtaccaccagcccaccagctcagcgctccacttcgcggactccgtaatggtggcttcctcggccggtgtccacgacggcggtgccatgctcagcgcggccgccgctaacggtgtcgctggcgctgccagtgccaacggcggcggcatcgggctgtccatgattaagaactggctgcggagccaaccggcgcccatgcagccgagggtggcggcggctgagggcgcgcaggggctctctttgtccatgaacatggcggggacgacccaaggcgctgctggcatgccacttctcgctggagagcgcgcacgggcgcccgagagtgtatcgacgtcagcacagggtggagccgtcgtcgtcacggcgccgaaggaggatagcggtggcagcggtgttgccggcgctctagtagccgtgagcacggacacgggtggcagcggcggcgcgtcggctgacaacacggcaaggaagacggtggacacgttcgggcagcgcacgtcgatttaccgtggcgtgacaaggcatagatggactgggagatatgaggcacatctttgggataacagttgcagaagggaagggcaaactcgtaagggtcgtcaagtctatttaggtggctatgataaagaggagaaagctgctagggcttatgatcttgctgctctgaagtactggggtgccacaacaacaacaaattttccagtgagtaactacgaaaaggagctcgaggacatgaagcacatgacaaggcaggagtttgtagcgtctctgagaaggaagagcagtggtttctccagaggtgcatccatttacaggggagtgactaggcatcaccaacatggaagatggcaagcacggattggacgagttgcagggaacaaggatctttacttgggcaccttcagcacccaggaggaggcagcggaggcgtacgacatcgcggcgatcaagttccgcggcctcaacgccgtcaccaacttcgacatgagccgctacgacgtgaagagcatcctggacagcagcgccctccccatcggcagcgccgccaagcgcctcaaggaggccgaggccgcagcgtccgcgcagcaccaccacgccggcgtggtgagctacgacgtcggccgcatcgcctcgcagctcggcgacggcggagccctggcggcggcgtacggcgcgcactaccacggcgccgcctggccgaccatcgcgttccagccgggcgccgccagcacaggcctgtaccacccgtacgcgcagcagccaatgcgcggcggcgggtggtgcaagcaggagcaggaccacgcggtgatcgcggccgcgcacagcctgcaggacctccaccacctgaacctgggcgcggccggcgcgcacgactttttctcggcagggcagcaggccgccgccgctgcgatgcacggcctgggtagcatcgacagtgcgtcgctcgagcacagcaccggctccaactccgtcgtctacaacggcggggtcggcgacagcaacggcgccagcgccgtcggcggcagtggcggtggctacatgatgccgatgagcgctgccggagcaaccactacatcggcaatggtgagccacgagcaggtgcatgcacgggcctacgacgaagccaagcaggctgctcagatggggtacgagagctacctggtgaacgcggagaacaatggtggcggaaggatgtctgcatgggggactgtcgtgtctgcagccgcggcggcagcagcaagcagcaacgacaacatggccgccgacgtcgggcatggcggcgcgcagctcttcagtgtctggaacgacacttaagcgtacctagtggtacctgacatcttatagtctgcaacctctcgtgtctgaattcctatctttatcaagtgttattgcttccacgactataggacagctttcgtcgaaagcttttgctcatgtgatctcgaaggattcatctagtctgatttttcgtgacttgtatcggttttattggattcatccaacatatatcaataaaaaatgagttgtgtttcctttcttcctagttcagttaaaattatttccctcctgcgcttgtgctgtaattgtctgtgtacctgttgtttgtgactgtgttagttcccttggatatgatttcgtatttgatatgtacatggagatagcttagcttcattattggagtatgaagttagtatgacatagtcactctcctggaaaattgacactgcaaaccatatttttattctgaaccacaaatcctagtcagtccgctggcatatgccgtccgtttgctgaatccagaacgtgggtttggagatgtacggctgagatgcctctatgcgaaggggatttcgtggtgaaacgagatgggagtagagcaacgcccgtggaagatgcttcaaacttccacacttttgagcaacgatcggcagtagtaaggtagacgatttcaagatcaaagcatatgaagataaacaacatcaacaacaaaatttgttggggttctatagagagaaacagagctacatacatacactgttttgtatctaccatctgagatgatgaaaagatgaaaaactaaagaatgccccggcgccaacgccaggacacgccgcgcgcgcgtcacccgagccatctcttgacccagccggcgctgtatatttacacacgttgcagcatcgatcaccacctgttcgatcgcgtcgccgtcaccgggatctgagtcgaaacctagacttgtccatcttctggattggccaacttaattaatgtatgaaataaaaggatgcacacatagtgacatgctaatcactataatgtgggcatcaaagttgtgtgttatgtgtaattactagttatctgaataaaagagaaagagatcatccatatttcttatcctaaatgaatgtcacgtgtctttataattctttgatgaaccagatgcatttcattaaccaaatccatatacatataaatattaatcatatataattaatatcaattgggttagcaaaacaaatctagtctaggtgtgttttgcgaatgcgaccttcttatgtgcttctagtctccaaatgtggttgatagttattttgctctaagatcaacagtaatgaagtataaatcatcgttgtggtgtgctactcggttaattgagcattaacacacacaaacatgacgaggatggtataatctccaaaaatgtgtactttgttaggtgggaccctatagccttgattaatgtgctatgttaggcatgcctggaaacgtgtgacgcatatgttttgtgaacctgttgatattatatgtgcttttatattaccatattttattaaaatactaatatttattactagtaagatataacattctatctagcttaaaaactaaccataaatattccataataactagatttaccaaactaatatactaaatatacataataaatacaaaattaacaagacaataatcaatatttatgagcttaatatatttagacattatggttggtcgacgataatcatgctaacttttcgtaattgcttgattgaaatatgcttagaataatgcctctttgttctacatggcaaatagggaccattatggtgtaacaccctgggaaccacaaacaccccgaaatgctactaaactacacaactaaccttcatatataaaatttcgacagcatctcctttgaaaatttgcatagacgtggaagcaacagagtataaacagatatcatgataagaaaacatactagacattaataatctgctagaaatgggaagaatcctaacttgacgactgcgtaactgactagagtcacacttagctgaccctagtcacttacaactgacttcgtgtcctagatcgatgggccctggccgaagcttggtcacccggtccgggcctagaaggccagcttcaagtttgtaccctggagcttgccgagtgccatccttggacactcgataaagtatattttattttttttattttgccaaccaaactttttgtggtatgttcctacactatgtagatctacatgtaccattttggcacaattacatatttacaaaaatgttttctataaatattagatttagttcgtttatttgaatttcttcggaaaattcacatttaaactgcaagtcactcgaaacatggaaaaccgtgcatgcaaaataaatgatatgcatgttatctagcacaagttacgaccgatttcagaagcagaccagaatcttcaagcaccatgctcactaaacatgaccgtgaacttgttatctagttgtttaaaaattgtataaaacacaaataaagtcagaaattaatgaaacttgtccacatgtcatgatatcatatatagaggttgtgataaaaatttgataatgtttcggtaaagttgtgacgtactatgtgtagaaacctaagtgacctacacataaaatcatagagtttcaatgtagttcactcgacaaagactttgtcaagtgtccgataaaaagtactcgacaaagaagccgttgtcgatgtactgttcgtcgagatctctttgtcgagtgtcacactaggcaaagtctttacggagtgtttttcaggctttgacactcggcaaagcgctcgattccagtagtgacagtaatttgcatcaaaaatagctgagagatttaggccccgtttcaatctcacgggataaagtttagcttcctgctaaactttagctatatgaattgaagtgctaaagtttagtttcaattaccaccattagctctcctgtttagattacaaatggctaaaagtagctaaaaaatagctgctaaagtttatctcgcgagattgaaacagggccttaaaatgagtcaactaatagaccaactaattattagctattagtcgttagcttctttaatctaagctaaaaccaactaatagcttatttgttgaattacaattagctcaacggaattctctgtttttctaaaaaaaaactgcccctctcttacagcaaattgtccgctgcccgtcgtccagatacaatgaacgtacctagtaggaactcttttacacgctcggtcgctcgccgcggatcggagtccccggaacacgacaccactgtggaacacgacaaagtctgctcagaggcggccacaccctggcgtgcaccgagccggagcccggataagcacggtaaggagagtacggcgggacgtggcgacccgtgtgtctgctgccacgcagccttcctccacgtagccgcgcggccgcgccacgtaccagggcccggcgctggtataaatgcgcgccacctccgctttagttctgcatacagccaacccaaggatgtccaacctgctcacggttcaccagaaccttccggctcttccagtggacgcgacgtccgatgaagtcaggaagaacctcatggacatgttccgcgacaggcaagcgttcagcgagcacacctggaagatgctgctctccgtctgccgctcctgggctgcatggtgcaagctgaacaacaggaagtggttccccgctgagcccgaggacgtgagggattaccttctgtacctgcaagcgcgaggtttgtttctgcttctacctttgatatatatataataattatcattaattagtagtaatataatatttcaaatatttttttcaaaataaaagaatgtagtatatagcaattgcttttctgtagtttataagtgtgtatattttaatttataacttttctaatatatgaccaaaacatggtgatgcctaggtctggcagtgaagaccatccagcaacaccttggacaactgaacatgcttcacaggcgctccggcctcccgcgccccagcgactcgaacgccgtgagcctcgtcatgcgccgcatcaggaaggaaaacgtcgatgccggcgaaagggcaaagcaggccctcgcgttcgagaggaccgatttcgaccaggtccgcagcctgatggagaacagcgacaggtgccaggacattaggaacctggcgttcctcggaattgcatacaacacgctcctcaggatcgcggaaattgcccgcattcgcgtgaaggacattagccgcaccgacggcggcaggatgcttatccacattggcaggaccaagacgctcgtttccaccgcaggcgtcgaaaaggccctcagcctcggagtgaccaagctcgtcgaacgctggatctccgtgtccggcgtcgcggacgacccaaacaactacctcttctgccgcgtccgcaagaacggggtggctgcccctagcgccaccagccaactcagcacgagggccttggaaggtattttcgaggccacccaccgcctgatctacggcgcgaaggatgacagcggtcaacgctacctcgcatggtccgggcactccgcccgcgttggagctgctagggacatggcccgcgccggtgtttccatccccgaaatcatgcaggcgggtggatggacgaacgtgaacattgtcatgaactacattcgcaaccttgacagcgagacgggcgcaatggttcgcctcctggaagatggtgactgagctagacccagctttcttgtacaaagtggccgttaacggatccagacttgtccatcttctggattggccaacttaattaatgtatgaaataaaaggatgcacacatagtgacatgctaatcactataatgtgggcatcaaagttgtgtgttatgtgtaattactagttatctgaataaaagagaaagagatcatccatatttcttatcctaaatgaatgtcacgtgtctttataattctttgatgaaccagatgcatttcattaaccaaatccatatacatataaatattaatcatatataattaatatcaattgggttagcaaaacaaatctagtctaggtgtgttttgcgaattgcggcaagctgttaccgaattcctgcccttaaggccaattgttcaagattcattcaacaattgaaacatctcccatgattaaatcagtataaggttgctatggtcttgcttgacaaagtttttttttgagggaatttcaactaaatttttgagtgaaactatcaaatactgattttaaaaaatttttataaaaggaagcgcagagataaaaggccatctatgctacaaaagtacccaaaaatgtaatcctaaagtatgaattgcattttttttttgtttggacgaaaggaaaggagtattaccacaagaatgatatcatcttcatatttagatcttttttgggtaaagcttgagattctctaaatatagagaaatcagaagaaaaaaaaaccgtgttttggtggttttgatttctagcctccacaataactttgacggcgtcgacaagtctaacggacaccaagcagcgaaccaccagcgccgagccaagcgaagcagacggccgagacgttgacaccttcggcgcggcatctctcgagagttccgctccggcgctccacctccaccgctggcggtttcttattccgttccgttccgcctcctgctctgctcctctccacaccacacggcacgaaaccgttacggcaccggcagcacccagcacgggagaggggattcctttcccaccgttccttccctttccgccccgccgctataaatagccagccccatccccagcttttttccccaatctcatctcctctctcctgttgttcggagcacacgcacaatccgatcgatccccaaatccccttcgtctctcctcgcgagcctcgtggatcccagcttcaaggtacggcgatcgatcatcccccctccttctctctaccttcttttctctagactacatcggatggcgatccatggttagggcctgctagtttcccttcctgttttgtcgatggctgcgaggcacaatagatctgatggcgttatgacggctaacttgtcatgttgttgcgatttatagtccctttaggagatcagtttaatttctcggatggttcgagatcggtggtccatggttagtaccctaagatccgcgctgttagggttcgtagatggaggcgacctgttctgattgttaacttgtcagtacctgggaaatcctgggatggttctagctcgtccgcagatgagatcgatttcatgatcctctgtatcttgtttcgttgcctaggttccgtctaatctatccgtggtatgatgtagatgttttgatcgtgctaactacgtcttgtaaagttaattgtcaggtcataatttttagcatgcctttttttttgtttggttttgtctaattgggctgtcgttctagatcagagtagaagactgttccaaactacctgctggatttattgaacttggatctgtatgtgtgtcacatatcttcataaattcatgattaagatggattgaaatatcttttatctttttggtatggatagttctatatgttggtgtggctttgttagatgtatacatgcttagatacatgaagcaacgtgctgctactgtttagtaattgctgttcatttgtctaataaacagataaggatatgtatttatgttgctgttggttttgctggtactttgttggatacaaatgcttcaatacagaaaacagcatgctgctacgatttaccatttatctaatcttatcatatgtctaatctaataaacaaacatgcttttaaattatcttcatatgcttggatgatggcatacacagcggctatgtgtggttttttaaatacccagcatcatgggcatgcatgacactgctttaatatgctttttatttgcttgagactgtttcttttgtttatactgaccctttagttcggtgactcttctgcaggtcgactttaacttagcctaggatccatggcccagtccaagcacggcctgaccaaggagatgaccatgaagtaccgcatggagggctgcgtggacggccacaagttcgtgatcaccggcgagggcatcggctaccccttcaagggcaagcaggccatcaacctgtgcgtggtggagggcggccccttgcccttcgccgaggacatcttgtccgccgccttcatgtacggcaaccgcgtgttcaccgagtacccccaggacatcgtcgactacttcaagaactcctgccccgccggctacacctgggaccgctccttcctgttcgaggacggcgccgtgtgcatctgcaacgccgacatcaccgtgagcgtggaggagaactgcatgtaccacgagtccaagttctacggcgtgaacttccccgccgacggccccgtgatgaagaagatgaccgacaactgggagccctcctgcgagaagatcatccccgtgcccaagcagggcatcttgaagggcgacgtgagcatgtacctgctgctgaaggacggtggccgcttgcgctgccagttcgacaccgtgtacaaggccaagtccgtgccccgcaagatgcccgactggcacttcatccagcacaagctgacccgcgaggaccgcagcgacgccaagaaccagaagtggcacctgaccgagcacgccatcgcctccggctccgccttgccctccggactcagatctcgatagggtaccaatggccagttaacagatccagctgctgctgttctagggttcacaagtctgcctatttgtcttccccaatggagctatggttgtctggtctggtccttggtcgtgtcccgtttcattgtgtactatttacctgtaatgtgtatccttaagtctggtttgatggtgtctgaaacgttttgctgtggtagagcagcatggaagaactataatgaataagtgatccctaatcattgtgtccaaattttgcttctgctatacccttttgtgctgtttcttatgttttgcttaaaaatttgatctgacaaacaaatttgtctaaattatgctcttgttctgactgtgtactgtacacatttgtattgctaccggtttggcacatagttttctctttgattgcagatcaaacccttctgattgcagattgcttggctatggctgatgtgctcactgttcttctttagcttgtatattgctgatggtggcttggctacggctgaaaaagttgctgctgcgccgacttggcaactgttgctccagtaatgctttgtcctctcttcctagccgccgacttggcacttggcagctgttgctcctgtaatgcgttgttatctcttatctcttgagatgtactatgattttgaggctgtttgacttgtgccagattgccagtgctgatgctatattatctcaggtttttatgctagtatatgttttactgtgtgctgcctgtgtcgagttacgtaatctattgaaccgctatgcgtgttgatgccctgttgttgcttgccagattgatgcccctgttgcttgcagcttgcaagctgtagtgaaatcctaaaattcgaaaccaaatctattctgaacttttgaagatctgtgatgtccggaagaaaagattcaaacagataaacgggactctccagaatctataaaataaatgatcgacaaacgctttgctttggtaggcttcctagttagttagcggaccgaagcttcggtccgggcctagaaggccagcttcggccgccccatttcaaatatttttttcaaaataaaagaatgtagtatatagcaattgcttttctgtagtttataacttcgtatagcatacattatacgaagttatacttttctaatatatgaccaaaatttgttgatgtgcaggtcttcgcctaccccggcggcgcgtccatggagatccaccaggcactcacccgctcccccgtcatcgccaaccacctcttccgccacgagcaaggggaggcctttgccgcctccggctacgcgcgctcctcgggccgcgtcggcgtctgcatcgccacctccggccccggcgccaccaacctagtctccgcgctcgccgacgcgctgctcgattccgtccccatggtcgccatcacgggacaggtggcgcgacgcatgattggcaccgacgccttccaggagacgcccatcgtcgaggtcacccgctccatcaccaagcacaactacctggtcctcgacgtcgacgacatcccccgcgtcgtgcaggaggctttcttcctcgcctcctctggtcgaccagggccggtgcttgtcgacatccccaaggacatccagcagcagatggcggtgcctgtctgggacaagcccatgagtctgcctgggtacattgcgcgccttcccaagccccctgcgactgagttgcttgagcaggtgctgcgtcttgttggtgaatcgcggcgccctgttctttatgtgggcggtggctgcgcagcatctggtgaggagttgcgacgctttgtggagctgactggaatcccggtcacaactactcttatgggcctcggcaacttccccagcgacgacccactgtctctgcgcatgctaggtatgcatgggacggtgtatgcaaattatgcagtggataaggccgatctgttgcttgcacttggtgtgcggtttgatgatcgcgtgacagggaagattgaggcttttgcaagcagggctaagattgtgcacgttgatattgatccggctgagattggcaagaacaagcagccacatgtgtccatctgtgcagatgttaagcttgctttgcagggcatgaatgctcttcttgaaggaagcacatcaaagaagagctttgactttggctcatggaacgatgagttggatcagcagaagagggaattcccccttgggtataaaacatctaatgaggagatccagccacaatatgctattcaggttcttgatgagctgacgaaaggcgaggccatcatcggcacaggtgttgggcagcaccagatgtgggcggcacagtactacacttacaagcggccaaggcagtggttgtcttcagctggtcttggggctatgggatttggtttgccggctgctgctggtgcttctgtggcaaacccaggtgtcactgttgttgacatcgatggagatggtagctttctcatgaacgttcaggagctagctatgatccgaattgagaacctcccagtgaaggtctttgtgctaaacaaccagcacctggggatggtggtgcagttggaggacaggttctataaggccaacagagcgcacacatacttgggaaacccagagaatgaaagtgagatatatccagatttcgtgacgatcgccaaagggttcaacattccagcggtccgtgtgacaaagaagaacgaagtccgcgcagcgataaagaagatgctcgagactccagggccgtacctcttggatataatcgtcccacaccaggagcatgtgttgcctatgatccctagtggtggggctttcaaggatatgatcctggatggtgatggcaggactgtgtactgatgactagctagtcagttaacagatctgccagatcctcggtgtacaaataacccgtcttatcctatgagacgggccggcgtcagtgtgttctggaggaatttttatgtcagagcctttttctttgtgtgcttgatgtagatgccaagggaagcttattggctgttgaagcttgatgcaaaataaattatggaactctgttttttgtttatctaataataactagcaaatatgcttccattgcattgaaactaacagccttttgtgtttccaagttttattttgtgacaatgtcatctatttcaattagttgtggaatcggaaacttgcaggactaacttggaaactccaatccctcagcatcctggactttttcctggtgtaatccatgtagatattattttaatcatcattttagttctggaggtttttccatctccggttttgctcccctttcttcaaaaaaaaaaaaaaaatgccgtaggcgccgcaacgcccacctgttgttcaaactcatgggcacgagtggctcgaagattttatacaacaattgctgtagtttcaccgttgctggtgaagaagcatttttttaaaaaaatatagtggtattcattttaattagtttagttgtgcagcgagcaaaatttggacatgctctgctcggaatctgatcgacctagacacagattagcagcagtagctttgtcatctgttccaagagttgcgatctgatagaagaaaaaaaaaccttcccttcaatgtaaaaccgaaactaacaagaaagaagcacagtgccgtttaggcaagtatggagtacgtattaagcatgtagaaggccatgcatgaaccactaacaagaaagaagcgcagtgccattcaggcaagcataagcatgtagattggcatgcatgaacaactaacagtagatcgtctctggtctgattagaagttttttgggaagccaagaaatcatgtacaactggttccatctcaaattccgtggcaaaaagaggcctaagcaacataaagctttccactggttgccatatatgatttgggcatttcactttgatcttaatgggccttgtaaagcccaagactcatgattatctttagttgatgctcttaattaggtgtgggcaaataattcaaactgtatgtacccgaccaaaaccaaagcaaaaataatcgaaccaaaccgaaaatttaaaaataaccgaatgaaaactaaatcctataactgaaagaactgaaaccgaatcaaaatatttaatgtaaccaaaaatatccgaaatataattatattgtcaaaaatattaataatttctagattaaataattaaaaatacttaaaaatttatataaaatagtaaaaatactcgaaaataaccacaaatattcaaaaacaaccgaaatatcccaaaatattcaaagcaaaataaccgaatggataccaaattttaaaaccgaaaaaactggaacaaaaccaaaatcgaaccaaaatttcaaaaatcgaataaatactaaactttagaacaaaaaaaaacgataaccgaatgtatacgaaccaaagccgaattagataaccgaacgtccaggactactcttaatctttccgccacttatgatttgggctattactttgtttataatgagccttttcaagctcaagttcatgattgtccgtgagatgagaaactgacttgttggattcgaaaccctagctagtattggttaatacttaatacataaatgacctgcattgacatcatcatccaagaaaataaaaattgtatgcttgagatatttagttttcctagctaggttttctttattttagtaccgaatctttaggtgtgccacgttaatttagacccattttttcatacttaccaactgagtctagtttaatcatgactataatcgtataaaatgattcagtcgacgtcattgcgaacgtatataaaatcatccaaattgacgtcattccaaagaggtaagcatgcttatctaagagtccgagcatactaaacaagacgacattttatttgcactccaaatcaaattttgtattgcctaaagaaaaacaatcaaactcaagtttcttaaaattaatttcattcaaactaatcactttcaatatctcacatattattcatgccatttctatttgtctaaacatgatttaaaaaaaaaagtaaaatacaaagattactatgcaaaaactctataaaaaaaaattcaaatttcttatttatttgtgacatcaaattttcaaaataatttttttaattatcggttgatccggtcagtcgataaaaacataaactttcagcgaccgttaaaactttcctactaccgatttagagaaaatcttagcttgaaacgtaattgtaacctgccttcatgcaagtcgcaagatatgtcatcctaagttgtatatgttttctcaaaagatgtatttacttgagaaaatacgtttcaacgttgatggacaaccaattaagaatcaagcacctttcgtaatcaatttaggcttatcgtctaaggtatactgatttacgacagttgactagacttataaggaacaaaataatagaatagtttctaaacacttcacctaatcatagagactaagatggtaattcgtaaacgacaaagcctagtgacactgtccattgtaaaattccacatcatattagtattaaacatatacatgtagtttcctgaacacatgtagtatcaaacacacttcgtggcttcttcctcgaaacctgcggccgctcattaattaagtcatctagttgaaggatcgctatcaactttgtatagaaaagttgggccgaattcgagctcggtacggccagaatggcccggaccgaagcttaccggtcaaccaatcaggatttctttgtagggtcgagagaaggaggaagtactctccatgccatgcacgccacagtattgaatgtttttggcatggtcatactagccgtgtgtctctgttccatttggccagccagctccaattatttggcatgatcatcctgtcatactagcagtagcagcgtcatcttcgccgctggccgccccctgcaggctgcagtgtcacacatgcctaatcctgcagtcctgccttttgccttccaaaccgtgtgagccttccgtgcgctcgtcaagtttatgggctgtatttttccgagaggagcctaatgggccaaaagcaaggccttttgggccaatcacgatgggccttaggacactttctaaggcaagaacatgaacctttttctttttctcatattgtcatctgcgtattgtttcatgaagttgctatgcaacgtcacctgaagttgtaaccaactccacgtcacctgaagttgtaaccaactccacgcatataatattggtcctattttgcagagcgtaggttctgttggatctacctgatcaatagttagcggctagtgtaaataaaatagatcctatgatccatctaagtttgaattttcatgtttaataatcagtatgtgactatttaaactaatcttatttgctaatgttttttcgatatagtttaaaggctgtagaatatacttgaacttaggcaaagtggtgaccgagatgatcaacacatcaatcaagacgttagaagccttgatgaaacattcacgagagacgagcaaggagtctaagacgctaagataaataaaacctagaccaaggcatgtggagaaataaagtcaaacaaatgctactcgacaacatccagcttgtccagtactgcaccagaccagcccagagacaaaaagttcaaaagcatgtaaaaagaacgcaacggtaacacaccagatgtgtccggtgctatgccctatgacataaccaacgccacaatgtgcacgatgtgctctagaatgtgaggccagacgcatccggtggcacaacgaacactttactcatctagggttatagagtggattgcaacatgacttggagatgacgacaacttaccgaacgtcacatttgacgacagatctccaatggccaataactgctggaaagccaatagatacgtcacatggacgcaccaaacgtgtttggtgtctatgtaaaatttgttgtgtatccccacgaccacatttacattgggggctatatatacccccttgctagccaaatagagggtggtagagtatgttgaaattgtaggagagtgtcaagacacttcatcaagtgctctaaccacacaaaaaacacttaacaaaagattagatgagcagcatagtgatttttgtgaattgcttatgctagttaaacacatttatttacccttgttgtaggttagggcctagtgtttagtgttgtttgcatagcgctcttaccactcatacactatttttgtacaccaggggcctgaagtcttacaccaatcgtgtttatggtgtgttcgtcaccgtgtgctaaaggaaacgaagcccacaaggaccgattcaggagaagccattttagagacacacttatgtgtagtcaagtcacatgatctattcatagagttattcgacctagagcttgacccttgtacgggaatttatgcgatgagctttaatgaggactaagaaagctaagatacaattaaacttattccgaaaccgacaattaaagacacttcttgggacggagggagtagctgacgttccgtaatgcatgcaagagaagtgaggagggccacgctagagaagagaagtacagaacggaatgagggacggtggcgcatgtccccgcaagatcctgagctgattctaaatcaagcatttgcttgaccaagtctatgcggcgcagagcccgcccgcgccctatgcttgctccggagctctcgttcgttccctgccgcggcagccatcgatcaccggccccaacgctagctttagcttcgcctatttacatacccgagcggagaagagaagagaagagaagcgatcgggattgtgggcgagtgcgtgcgttcgtgcagccacagacaggcgtccgggcacccctaggcgcgccatttaaatatggcggtggcggcgccggcctcggacgccaagccgcgcctcaacgtgccaccgtccatggcatccgcgctccgcctcgatcccgtggggctgggggcgggaccctctatgccgtccccctcccgccgactcgccgagcctcccaagacgccctccccatccaagaccacctacagcgaccgtttcatcccctgccgctcctcctcccgcctccagaacttcgcgctaatcgactcccctctctccccagccaaggacgacacgccctactcccgcctcctccgcgccgagctctttggccccgattcacccaaacccaccaccgccacctccgcagcctccgcctcgcccaacaccaacctcttccgcttcaagaaagaccactccgctcccacctcacccttcgctaaagctgccgccgcgcaccatgactgcaccgcgggatccggagacgcgccgtcgccgcagaagccacccaggaaggtccccaaaacgccgcataaggtcctggacgcgccctccctgcaggacgacttctatctcaacctcgtcgactggtcctcgcagaacgtgctcgccgtcggcctcggcacctgcgtctacctctggtccgcgtccaatagcaaggtcaccaagctctgcgatttggggcctagggacagcgtatgcgccgtgcattggtcacgggaaggctcttatctttccattggcaccggccttggagatgtccagatttgggatagttctcgctgtaagcggattagaaatatgggaggtcaccaaacaaggactggggtattagcatggagctcatgcatcttgtcgtcgggtagcagggacaagaacatactgcagcatgacatccgtgtccccaatgactatatcagcaagttttctggtcatagatcagaggtttgtggactcgaatggtcgcatgacgaccgcgagcttgcctcaggcggaaatgacaaccagttattagtctggaaccaacgatcgcaacagccagttttgcggttgacagaacatacagctgctgttaaagcaatagcgtggtcaccacatcagcaaggactcctagcatcaggaggtggaacagctgatagatgcatcaggttttggaacacggctaacggaaatgttctgaactcaattgacacaggcagccaggtttgcaaccttgcctggtgcaaaaatgtgaatgagcttgtgagcacacatggatattcccaaaatcagatcatggtgtggaaatacccatccatgtcaaaggttgcaactctaactggacatacgatgcgtgtgctttacctcgcgtcgtcgcctgatggacagaccatagtaacaggggcaggtgacgaaactctacggttctggaacatatttccatcagttagaacacagactcctgtgcgtgatattgggctctcgtcattctcaagaagccacatccggtgaatttaaatgcccgggcgatcgctcgaggcgtacctagtggtaccacatggttaacctagacttgtccatcttctggattggccaacttaattaatgtatgaaataaaaggatgcacacatagtgacatgctaatcactataatgtgggcatcaaagttgtgtgttatgtgtaattactagttatctgaataaaagagaaagagatcatccatatttcttatcctaaatgaatgtcacgtgtctttataattctttgatgaaccagatgcatttcattaaccaaatccatatacatataaatattaatcatatataattaatatcaattgggttagcaaaacaaatctagtctaggtgtgttttgcgaatgcggccgccaccgcggtggagctcgaattccggtccgggcctagaaggccagcttcaagtttgtacaaaaaagcaggctccggccagaatggcccggaccgggttaccgaattcgagctcggtaccctgggatccgatatcgatgggccctggccgaagcttggtcacccggtccgggcctagaaggccgatctcccgggcacccagctttcttgtacaaagtggccgttaacggatcggccagaatggcccggaccgaagcttgcatgcctgcagtgcagcgtgacccggtcgtgcccctctctagagataatgagcattgcatgtctaagttataaaaaattaccacatattttttttgtcacacttgtttgaagtgcagtttatctatctttatacatatatttaaactttactctacgaataatataatctatagtactacaataatatcagtgttttagagaatcatataaatgaacagttagacatggtctaaaggacaattgagtattttgacaacaggactctacagttttatctttttagtgtgcatgtgttctcctttttttttgcaaatagcttcacctatataatacttcatccattttattagtacatccatttagggtttagggttaatggtttttatagactaatttttttagtacatctattttattctattttagcctctaaattaagaaaactaaaactctattttagtttttttatttaataatttagatataaaatagaataaaataaagtgactaaaaattaaacaaataccctttaagaaattaaaaaaactaaggaaacatttttcttgtttcgagtagataatgccagcctgttaaacgccgtcgacgagtctaacggacaccaaccagcgaaccagcagcgtcgcgtcgggccaagcgaagcagacggcacggcatctctgtcgctgcctctggacccctctcgagagttccgctccaccgttggacttgctccgctgtcggcatccagaaattgcgtggcggagcggcagacgtgagccggcacggcaggcggcctcctcctcctctcacggcaccggcagctacgggggattcctttcccaccgctccttcgctttcccttcctcgcccgccgtaataaatagacaccccctccacaccctctttccccaacctcgtgttgttcggagcgcacacacacacaaccagatctcccccaaatccacccgtcggcacctccgcttcaaggtacgccgctcgtcctcccccccccccctctctaccttctctagatcggcgttccggtccatgcatggttagggcccggtagttctacttctgttcatgtttgtgttagatccgtgtttgtgttagatccgtgctgctagcgttcgtacacggatgcgacctgtacgtcagacacgttctgattgctaacttgccagtgtttctctttggggaatcctgggatggctctagccgttccgcagacgggatcgatttcatgattttttttgtttcgttgcatagggtttggtttgcccttttcctttatttcaatatatgccgtgcacttgtttgtcgggtcatcttttcatgcttttttttgtcttggttgtgatgatgtggtctggttgggcggtcgttctagatcggagtagaattctgtttcaaactacctggtggatttattaattttggatctgtatgtgtgtgccatacatattcatagttacgaattgaagatgatggatggaaatatcgatctaggataggtatacatgttgatgcgggttttactgatgcatatacagagatgctttttgttcgcttggttgtgatgatgtggtgtggttgggcggtcgttcattcgttctagatcggagtagaatactgtttcaaactacctggtgtatttattaattttggaactgtatgtgtgtgtcatacatcttcatagttacgagtttaagatggatggaaatatcgatctaggataggtatacatgttgatgtgggttttactgatgcatatacatgatggcatatgcagcatctattcatatgctctaaccttgagtacctatctattataataaacaagtatgttttataattattttgatcttgatatacttggatgatggcatatgcagcagctatatgtggatttttttagccctgccttcatacgctatttatttgcttggtactgtttcttttgtcgatgctcaccctgttgtttggtgttacttctgcaggtcgactttaacttagcctaggatccatggcctcctccgagaacgtcatcaccgagttcatgcgcttcaaggtgcgcatggagggcaccgtgaacggccacgagttcgagatcgagggcgagggcgagggccgcccctacgagggccacaacaccgtgaagctgaaggtgaccaagggcggccccctgcccttcgcctgggacatcctgtccccccagttccagtacggctccaaggtgtacgtgaagcaccccgccgacatccccgactacaagaagctgtccttccccgagggcttcaagtgggagcgcgtgatgaacttcgaggacggcggcgtggcgaccgtgacccaggactcctccctgcaggacggctgcttcatctacaaggtgaagttcatcggcgtgaacttcccctccgacggccccgtgatgcagaagaagaccatgggctgggaggcctccaccgagcgcctgtacccccgcgacggcgtgctgaagggcgagacccacaaggccctgaagctgaaggacggcggccactacctggtggagttcaagtccatctacatggccaagaagcccgtgcagctgcccggctactactacgtggacgccaagctggacatcacctcccacaacgaggactacaccatcgtggagcagtacgagcgcaccgagggccgccaccacctgttcctgtagggtaccacatggttaacctagacttgtccatcttctggattggccaacttaattaatgtatgaaataaaaggatgcacacatagtgacatgctaatcactataatgtgggcatcaaagttgtgtgttatgtgtaattactagttatctgaataaaagagaaagagatcatccatatttcttatcctaaatgaatgtcacgtgtctttataattctttgatgaaccagatgcatttcattaaccaaatccatatacatataaatattaatcatatataattaatatcaattgggttagcaaaacaaatctagtctaggtgtgttttgcgaatgcggccgccaccgcggtggagctcgaattccggtccgggcctagaaggccagcttcggccgccccgggcaactttattatacaaagttgatagatcctcatgtcttcatcgtaagcttaaacaggccagaatggcctctggattcagcggcctagaaggccgaagtacttggtcttcctagtcgagtagatcacattcaagcttggtcacccggtccgtcaatattctgattccgatgacttcgtaggttcctagctcaagccgctcgtgtccaagcgtcacttacgattagctaatgattacggcatctaggaccgactagtggcgcgccgactagctagctaaggtaccgagctcgaattcattccgattaatcgtggcctcttgctcttcaggatgaagagctatgtttaaacgtgcaagcgctactagacaattcagtacattaaaaacgtccgcaatgtgttattaagttgtctaagcgtcaatttgtttacaccacaatatatcctgcca

SEQ ID NO: 46 - DNA, 28586 bp, Artificial Sequence
  RX000016
gtttacccgccaatatatcctgtcaaacactgatagtttaaactgaaggcgggaaacgacaatctgatcatgagcggagaattaagggagtcacgttatgacccccgccgatgacgcgggacaagccgttttacgtttggaactgacagaaccgcaacgttgaaggagccactcagcaagctggtacgattgtaatacgactcactatagggcgaattgagcgctgtttaaacgctcttcaactggaagagcggttacgctgtttaaacgctcttcaactggaagagcggttactaccggttcactagctagctgctaatcgagctagttaccctatgaggtgacatgaagcgctcacggttactatgacggttagcttcacgactgttggtggcagtagcgtacgacttagctatagttccggacttacccttaagcgatttaaatctgcggttaccgaattcgagctcggtaccctgggatctgcccttactttaacgcctctaaccaacacccctttatctttataaggaacaataaacagaatttgccccactgttctaaatcacctaataatatccccagctaaaaacaataaaggtttcctagaattaagacaagcatgactgttcctccaggagggtttggaacattgttgcagtcttgcagatacgggcgaagggtgagaaacagagcggagggctggaggtgacctcggtagtcgacgccggagttgagcttgacaacgacggggcggcccctgatggacttgaggaagtccgatggcgtcttcaccgtcccgccggcgcccgaggcgggcctgtcgctgccgccgccgccgctgctcatcttgcgcgctgtgcccccggcggtgtccctgtgttgcggatcgcgggtgggccaggtggatgcgagggcgacccgtttggactccggccggagccgccggatccctggtcggtgtcagtgccgtttactctgggccccacgtgtcagtaccgtctgtagatgacaacaacccgtcgtccacagtcatgtccaaaatatcctttcttcttttttttcgattcggatatctatcttccttttttttttccaaaaatcttcttgacgcaccagcgcgcacgtttgtggtaaacgccgacacgtcggtcccacgtcgatagaccccacccaccagtgagtagcgtgtacgtattcgggggtgacggacgtgtcgccgtcgtcttgctagtcccattcccatctgagccacacatctctgaacaaaaaaaaggagggaggcctccacgcacatccccctccgtgccacccgccccaaaccctcgcgccgcctccgagacagccgccgcaaccatggccaccgccgccgccgcgtctaccgcgctcactggcgccactaccgctgcgcccaaggcgaggcgccgggcgcacctcctggccacccgccgcgccctcgccgcgcccatcaggtgctcagcggcgtcacccgccatgccgatggctcccccggccaccccgctccggccgtggggccccaccgagccccgcaagggtgctgacatcctcgtcgagtccctcgagcgctgcggcgtccgcgacgtaagtttctgcttctacctttgatatatatataataattatcattaattagtagtaatataatatttcaaatatttttttcaaaataaaagaatgtagtatatagcaattgcttttctgtagtttataacttcgtatagcatacattatacgaagttatacttttctaatatatgaccaaaatttgttaccgaattcaggcgacccatcgctgctttgtctacatcatgttcttcatcatcctccccaggcgacgcgtgctgctgttcttattcagactaccgttcgagtgactgcatggcgtacatctttctgcatcgactttgtacggctacatcgaacatatacacgagatgtctcgtgtgaatagagtcactaatgccttaagcatcggttactccgtagggtacattctgttcttcttatttgtgcatatttttattgttgtttactgattatacgagtagttatacatacatgcacatacatatcatcacatatatcacaatatttttctaaattaaattaaaactaaaaatgactaaatttctaacaccaacgacattgtaatgttttctccaacaactttacctattctacattgttctatttcgaatttcactctataaacaacatagtctacaatggaaaacagtgctttgtacgactatatacgcgatgtgtggctacaacataagacaatatagtcgtttgaagattgaacctatatatcggtacggttaatccgtctatgtacgtgggcatgacgaacacccgtgataacgaaggattaacgtgcacaatcataaatccaaagtaggagcggtgcatgatgagaatcgctctcagtactcgacataatgaaccttacgaggtacaacaggcaggcaggcagggaccaggggccgcctttatttcaggctcgctggccccacgggcgtgctgcgtgcacgaagggcactaccccaacctctcaccgaaaaccgcgctggatcggcaaatcaaacgaggtggtgccccgtgcccactctccacgtccacggcaccatccctctgcagccgctcaccagccatgccgtgtcgcggaacggcacaaccacccccaacccactcacgaaaccccgtcccggccgtgcccgtgtcggtccgcgctcggcaacgaggcggcccgcgctgctgagtcccctggacacccgacaccctgtcggccctttgtttattcatcccgaaatctcatctgcccccacggccgactgcgctgcgccgcccggatatatatacccatcgttatcgatcgactggggactctatcagtgatagagtctagaggatcgctcaggaaggccgctgagatagaggcatggcggccaatgcgggcggcggtggagcgggaggaggcagcggcagcggcagcgtggctgcgccggcggtgtgccgccccagcggctcgcggtggacgccgacgccggagcagatcaggatgctgaaggagctctactacggctgcggcatccggtcgcccagctcggagcagatccagcgcatcaccgccatgctgcggcagcacggcaagatcgagggcaagaacgtcttctactggttccagaaccacaaggcccgcgagcgccagaagcgccgcctcaccagcctcgacgtcaacgtgcccgccgccggcgcggccgacgccaccaccagccaactcggcgtcctctcgctgtcgtcgccgccgccttcaggcgcggcgcctccctcgcccaccctcggcttctacgccgccggcaatggcggcggatcggctgtgctgctggacacgagttccgactggggcagcagcggcgctgccatggccaccgagacatgcttcctgcaggactacatgggcgtgacggacacgggcagctcgtcgcagtggccacgcttctcgtcgtcggacacgataatggcggcggccgcggcgcgggcggcgacgacgcgggcgcccgagacgctccctctcttcccgacctgcggcgacgacggcggcagcggtagcagcagctacttgccgttctggggtgccgcgtccacaactgccggcgccacttcttccgttgcgatccagcagcaacaccagctgcaggagcagtacagcttttacagcaacagcaacagcacccagctggccggcaccggcaaccaagacgtatcggcaacagcagcagcagccgccgccctggagctgagcctcagctcatggtgctccccttaccctgctgcagggagtatgtgagagcaacgcgagctgccactgctcttcactggtaccgttaacagatcattcgacaaagcagcattagtccgttgatcggtggaagaccactcgtcagtgttgagttgaatgtttgatcaataaaatacggcaatgctgtaagggttgttttttatgccattgataatacactgtactgttcagttgttgaactctatttcttagccatgccaagtgcttttcttattttgaataacattacagcaaaaagttgaaagacaaaaaaaaaaacccccgaacagagtgctttgggtcccaagcttctttagactgtgttcggcgttccccctaaatttctccccctatatctcactcacttgtcacatcagcgttctctttccccctatatctccacgctctacagcagttccacctatatcaaacctctataccccaccacaacaatattatatactttcatcttcaactaactcatgtaccttccaatttttttctactaataattatttacgtgcacagaaacttagcaaggagagagagagcggggtgacccaccttgctagttggatattacctcttctcttcaaagtatccttgaacgctcaccggttatcaaatctctacactatagctctgtagtcttgctagatagttagttctttagctctcggtgaccaagcttggcgcgatcaagcttatcgataccgtcgacctcgaagcttggtcacccggtccgggcctagaaggccagcttcaagtttgtacaaaaaagcaggctccggccagaatggcccggaccgggttaccgaattcttaccctagctccctgcggctgttacgcggtcccccatcaatcttctgttcttgcggttgtagcctgtgtaacagtgctagagtatgtatgataaataggttttaagtctgcttacatgacattttttattgtggaagagacatataaaaattagagagagtggttctcatgcaacggcggacggcccggtgctaaaagagcttcaagacaaaataatgaaacaggaagagagtagatttatctaagagccaactttattatatgaatgtgtttattgttggctttagatgatatggtaaggagttagagctaataatagataggctctattattattattattaattaaactcgctctaaggaggaaagtgggaggaagggacgaggacgaagactactggaagcatcgtgcatggatgatggatgtggtgtctcttaatgtaggtggccggaggatgtacgtgttaattgcgcgataagcactcagatccaaccgcaaactacctccacactgacacactgatagagagaaagagagacctccgacgactgccgccgcagatgagccacgtacgtatacgacgtctgccggccggctcaggctgccgccatcaccctgctcgaaagtcgcgttaggcggcgccagctacataggagtatctagtctagccagttagtatactactactgcgctgatgatgaattaactctgcatagatactgtacttgcctccctccaacacccaaccacctcctgctcggctcttaataacttggacacggatcgatgccatccaaggaagaacacgacgacgacgacggaacatccaccatgcaagcttgcatccatacgccgatacgcgtgcatccatccatccaccattatttccattttccaccgatcacacgtacacaggcctatttaaggagcgacatcccactgcaactctcctcaccactcatcaccagctagctctagcaaagcacttgccatctaccgaccgccgcattccaaacagcccgacgagctagcagagcggcaggcacctccctcctcaaggaacccatggccactgtgaacaactggctcgctttctccctctccccgcaggagctgccgccctcccagacgacggactccacactcatctcggccgccaccgccgaccatgtctccggcgatgtctgcttcaacatcccccaagattggagcatgaggggatcagagctttcggcgctcgtcgcggagccgaagctggaggacttcctcggcggcatctccttctccgagcagcatcacaaggccaactgcaacatgatacccagcactagcagcacagtttgctacgcgagctcaggtgctagcaccggctaccatcaccagctgtaccaccagcccaccagctcagcgctccacttcgcggactccgtaatggtggcttcctcggccggtgtccacgacggcggtgccatgctcagcgcggccgccgctaacggtgtcgctggcgctgccagtgccaacggcggcggcatcgggctgtccatgattaagaactggctgcggagccaaccggcgcccatgcagccgagggtggcggcggctgagggcgcgcaggggctctctttgtccatgaacatggcggggacgacccaaggcgctgctggcatgccacttctcgctggagagcgcgcacgggcgcccgagagtgtatcgacgtcagcacagggtggagccgtcgtcgtcacggcgccgaaggaggatagcggtggcagcggtgttgccggcgctctagtagccgtgagcacggacacgggtggcagcggcggcgcgtcggctgacaacacggcaaggaagacggtggacacgttcgggcagcgcacgtcgatttaccgtggcgtgacaaggcatagatggactgggagatatgaggcacatctttgggataacagttgcagaagggaagggcaaactcgtaagggtcgtcaagtctatttaggtggctatgataaagaggagaaagctgctagggcttatgatcttgctgctctgaagtactggggtgccacaacaacaacaaattttccagtgagtaactacgaaaaggagctcgaggacatgaagcacatgacaaggcaggagtttgtagcgtctctgagaaggaagagcagtggtttctccagaggtgcatccatttacaggggagtgactaggcatcaccaacatggaagatggcaagcacggattggacgagttgcagggaacaaggatctttacttgggcaccttcagcacccaggaggaggcagcggaggcgtacgacatcgcggcgatcaagttccgcggcctcaacgccgtcaccaacttcgacatgagccgctacgacgtgaagagcatcctggacagcagcgccctccccatcggcagcgccgccaagcgcctcaaggaggccgaggccgcagcgtccgcgcagcaccaccacgccggcgtggtgagctacgacgtcggccgcatcgcctcgcagctcggcgacggcggagccctggcggcggcgtacggcgcgcactaccacggcgccgcctggccgaccatcgcgttccagccgggcgccgccagcacaggcctgtaccacccgtacgcgcagcagccaatgcgcggcggcgggtggtgcaagcaggagcaggaccacgcggtgatcgcggccgcgcacagcctgcaggacctccaccacctgaacctgggcgcggccggcgcgcacgactttttctcggcagggcagcaggccgccgccgctgcgatgcacggcctgggtagcatcgacagtgcgtcgctcgagcacagcaccggctccaactccgtcgtctacaacggcggggtcggcgacagcaacggcgccagcgccgtcggcggcagtggcggtggctacatgatgccgatgagcgctgccggagcaaccactacatcggcaatggtgagccacgagcaggtgcatgcacgggcctacgacgaagccaagcaggctgctcagatggggtacgagagctacctggtgaacgcggagaacaatggtggcggaaggatgtctgcatgggggactgtcgtgtctgcagccgcggcggcagcagcaagcagcaacgacaacatggccgccgacgtcgggcatggcggcgcgcagctcttcagtgtctggaacgacacttaagcgtacctagtggtacctgacatcttatagtctgcaacctctcgtgtctgaattcctatctttatcaagtgttattgcttccacgactataggacagctttcgtcgaaagcttttgctcatgtgatctcgaaggattcatctagtctgatttttcgtgacttgtatcggttttattggattcatccaacatatatcaataaaaaatgagttgtgtttcctttcttcctagttcagttaaaattatttccctcctgcgcttgtgctgtaattgtctgtgtacctgttgtttgtgactgtgttagttcccttggatatgatttcgtatttgatatgtacatggagatagcttagcttcattattggagtatgaagttagtatgacatagtcactctcctggaaaattgacactgcaaaccatatttttattctgaaccacaaatcctagtcagtccgctggcatatgccgtccgtttgctgaatccagaacgtgggtttggagatgtacggctgagatgcctctatgcgaaggggatttcgtggtgaaacgagatgggagtagagcaacgcccgtggaagatgcttcaaacttccacacttttgagcaacgatcggcagtagtaaggtagacgatttcaagatcaaagcatatgaagataaacaacatcaacaacaaaatttgttggggttctatagagagaaacagagctacatacatacactgttttgtatctaccatctgagatgatgaaaagatgaaaaactaaagaatgccccggcgccaacgccaggacacgccgcgcgcgcgtcacccgagccatctcttgacccagccggcgctgtatatttacacacgttgcagcatcgatcaccacctgttcgatcgcgtcgccgtcaccgggatctgagtcgaaacctagacttgtccatcttctggattggccaacttaattaatgtatgaaataaaaggatgcacacatagtgacatgctaatcactataatgtgggcatcaaagttgtgtgttatgtgtaattactagttatctgaataaaagagaaagagatcatccatatttcttatcctaaatgaatgtcacgtgtctttataattctttgatgaaccagatgcatttcattaaccaaatccatatacatataaatattaatcatatataattaatatcaattgggttagcaaaacaaatctagtctaggtgtgttttgcgaatgcgaccttcttatgtgcttctagtctccaaatgtggttgatagttattttgctctaagatcaacagtaatgaagtataaatcatcgttgtggtgtgctactcggttaattgagcattaacacacacaaacatgacgaggatggtataatctccaaaaatgtgtactttgttaggtgggaccctatagccttgattaatgtgctatgttaggcatgcctggaaacgtgtgacgcatatgttttgtgaacctgttgatattatatgtgcttttatattaccatattttattaaaatactaatatttattactagtaagatataacattctatctagcttaaaaactaaccataaatattccataataactagatttaccaaactaatatactaaatatacataataaatacaaaattaacaagacaataatcaatatttatgagcttaatatatttagacattatggttggtcgacgataatcatgctaacttttcgtaattgcttgattgaaatatgcttagaataatgcctctttgttctacatggcaaatagggaccattatggtgtaacaccctgggaaccacaaacaccccgaaatgctactaaactacacaactaaccttcatatataaaatttcgacagcatctcctttgaaaatttgcatagacgtggaagcaacagagtataaacagatatcatgataagaaaacatactagacattaataatctgctagaaatgggaagaatcctaacttgacgactgcgtaactgactagagtcacacttagctgaccctagtcacttacaactgacttcgtgtcctagatcgatgggccctggccgaagcttggtcacccggtccgggcctagaaggccagcttcaagtttgtaccctggagcttgccgagtgccatccttggacactcgataaagtatattttattttttttattttgccaaccaaactttttgtggtatgttcctacactatgtagatctacatgtaccattttggcacaattacatatttacaaaaatgttttctataaatattagatttagttcgtttatttgaatttcttcggaaaattcacatttaaactgcaagtcactcgaaacatggaaaaccgtgcatgcaaaataaatgatatgcatgttatctagcacaagttacgaccgatttcagaagcagaccagaatcttcaagcaccatgctcactaaacatgaccgtgaacttgttatctagttgtttaaaaattgtataaaacacaaataaagtcagaaattaatgaaacttgtccacatgtcatgatatcatatatagaggttgtgataaaaatttgataatgtttcggtaaagttgtgacgtactatgtgtagaaacctaagtgacctacacataaaatcatagagtttcaatgtagttcactcgacaaagactttgtcaagtgtccgataaaaagtactcgacaaagaagccgttgtcgatgtactgttcgtcgagatctctttgtcgagtgtcacactaggcaaagtctttacggagtgtttttcaggctttgacactcggcaaagcgctcgattccagtagtgacagtaatttgcatcaaaaatagctgagagatttaggccccgtttcaatctcacgggataaagtttagcttcctgctaaactttagctatatgaattgaagtgctaaagtttagtttcaattaccaccattagctctcctgtttagattacaaatggctaaaagtagctaaaaaatagctgctaaagtttatctcgcgagattgaaacagggccttaaaatgagtcaactaatagaccaactaattattagctattagtcgttagcttctttaatctaagctaaaaccaactaatagcttatttgttgaattacaattagctcaacggaattctctgtttttctaaaaaaaaactgcccctctcttacagcaaattgtccgctgcccgtcgtccagatacaatgaacgtacctagtaggaactcttttacacgctcggtcgctcgccgcggatcggagtccccggaacacgacaccactgtggaacacgacaaagtctgctcagaggcggccacaccctggcgtgcaccgagccggagcccggataagcacggtaaggagagtacggcgggacgtggcgacccgtgtgtctgctgccacgcagccttcctccacgtagccgcgcggccgcgccacgtaccagggcccggcgctggtataaatgcgcgccacctccgctttagttctgcatacagccaacccaaggatgtccaacctgctcacggttcaccagaaccttccggctcttccagtggacgcgacgtccgatgaagtcaggaagaacctcatggacatgttccgcgacaggcaagcgttcagcgagcacacctggaagatgctgctctccgtctgccgctcctgggctgcatggtgcaagctgaacaacaggaagtggttccccgctgagcccgaggacgtgagggattaccttctgtacctgcaagcgcgaggtttgtttctgcttctacctttgatatatatataataattatcattaattagtagtaatataatatttcaaatatttttttcaaaataaaagaatgtagtatatagcaattgcttttctgtagtttataagtgtgtatattttaatttataacttttctaatatatgaccaaaacatggtgatgcctaggtctggcagtgaagaccatccagcaacaccttggacaactgaacatgcttcacaggcgctccggcctcccgcgccccagcgactcgaacgccgtgagcctcgtcatgcgccgcatcaggaaggaaaacgtcgatgccggcgaaagggcaaagcaggccctcgcgttcgagaggaccgatttcgaccaggtccgcagcctgatggagaacagcgacaggtgccaggacattaggaacctggcgttcctcggaattgcatacaacacgctcctcaggatcgcggaaattgcccgcattcgcgtgaaggacattagccgcaccgacggcggcaggatgcttatccacattggcaggaccaagacgctcgtttccaccgcaggcgtcgaaaaggccctcagcctcggagtgaccaagctcgtcgaacgctggatctccgtgtccggcgtcgcggacgacccaaacaactacctcttctgccgcgtccgcaagaacggggtggctgcccctagcgccaccagccaactcagcacgagggccttggaaggtattttcgaggccacccaccgcctgatctacggcgcgaaggatgacagcggtcaacgctacctcgcatggtccgggcactccgcccgcgttggagctgctagggacatggcccgcgccggtgtttccatccccgaaatcatgcaggcgggtggatggacgaacgtgaacattgtcatgaactacattcgcaaccttgacagcgagacgggcgcaatggttcgcctcctggaagatggtgactgagctagacccagctttcttgtacaaagtggccgttaacggatccagacttgtccatcttctggattggccaacttaattaatgtatgaaataaaaggatgcacacatagtgacatgctaatcactataatgtgggcatcaaagttgtgtgttatgtgtaattactagttatctgaataaaagagaaagagatcatccatatttcttatcctaaatgaatgtcacgtgtctttataattctttgatgaaccagatgcatttcattaaccaaatccatatacatataaatattaatcatatataattaatatcaattgggttagcaaaacaaatctagtctaggtgtgttttgcgaattgcggcaagctgttaccgaattcctgcccttaaggccaattgttcaagattcattcaacaattgaaacatctcccatgattaaatcagtataaggttgctatggtcttgcttgacaaagtttttttttgagggaatttcaactaaatttttgagtgaaactatcaaatactgattttaaaaaatttttataaaaggaagcgcagagataaaaggccatctatgctacaaaagtacccaaaaatgtaatcctaaagtatgaattgcattttttttttgtttggacgaaaggaaaggagtattaccacaagaatgatatcatcttcatatttagatcttttttgggtaaagcttgagattctctaaatatagagaaatcagaagaaaaaaaaaccgtgttttggtggttttgatttctagcctccacaataactttgacggcgtcgacaagtctaacggacaccaagcagcgaaccaccagcgccgagccaagcgaagcagacggccgagacgttgacaccttcggcgcggcatctctcgagagttccgctccggcgctccacctccaccgctggcggtttcttattccgttccgttccgcctcctgctctgctcctctccacaccacacggcacgaaaccgttacggcaccggcagcacccagcacgggagaggggattcctttcccaccgttccttccctttccgccccgccgctataaatagccagccccatccccagcttttttccccaatctcatctcctctctcctgttgttcggagcacacgcacaatccgatcgatccccaaatccccttcgtctctcctcgcgagcctcgtggatcccagcttcaaggtacggcgatcgatcatcccccctccttctctctaccttcttttctctagactacatcggatggcgatccatggttagggcctgctagtttcccttcctgttttgtcgatggctgcgaggcacaatagatctgatggcgttatgacggctaacttgtcatgttgttgcgatttatagtccctttaggagatcagtttaatttctcggatggttcgagatcggtggtccatggttagtaccctaagatccgcgctgttagggttcgtagatggaggcgacctgttctgattgttaacttgtcagtacctgggaaatcctgggatggttctagctcgtccgcagatgagatcgatttcatgatcctctgtatcttgtttcgttgcctaggttccgtctaatctatccgtggtatgatgtagatgttttgatcgtgctaactacgtcttgtaaagttaattgtcaggtcataatttttagcatgcctttttttttgtttggttttgtctaattgggctgtcgttctagatcagagtagaagactgttccaaactacctgctggatttattgaacttggatctgtatgtgtgtcacatatcttcataaattcatgattaagatggattgaaatatcttttatctttttggtatggatagttctatatgttggtgtggctttgttagatgtatacatgcttagatacatgaagcaacgtgctgctactgtttagtaattgctgttcatttgtctaataaacagataaggatatgtatttatgttgctgttggttttgctggtactttgttggatacaaatgcttcaatacagaaaacagcatgctgctacgatttaccatttatctaatcttatcatatgtctaatctaataaacaaacatgcttttaaattatcttcatatgcttggatgatggcatacacagcggctatgtgtggttttttaaatacccagcatcatgggcatgcatgacactgctttaatatgctttttatttgcttgagactgtttcttttgtttatactgaccctttagttcggtgactcttctgcaggtcgactttaacttagcctaggatccatggcccagtccaagcacggcctgaccaaggagatgaccatgaagtaccgcatggagggctgcgtggacggccacaagttcgtgatcaccggcgagggcatcggctaccccttcaagggcaagcaggccatcaacctgtgcgtggtggagggcggccccttgcccttcgccgaggacatcttgtccgccgccttcatgtacggcaaccgcgtgttcaccgagtacccccaggacatcgtcgactacttcaagaactcctgccccgccggctacacctgggaccgctccttcctgttcgaggacggcgccgtgtgcatctgcaacgccgacatcaccgtgagcgtggaggagaactgcatgtaccacgagtccaagttctacggcgtgaacttccccgccgacggccccgtgatgaagaagatgaccgacaactgggagccctcctgcgagaagatcatccccgtgcccaagcagggcatcttgaagggcgacgtgagcatgtacctgctgctgaaggacggtggccgcttgcgctgccagttcgacaccgtgtacaaggccaagtccgtgccccgcaagatgcccgactggcacttcatccagcacaagctgacccgcgaggaccgcagcgacgccaagaaccagaagtggcacctgaccgagcacgccatcgcctccggctccgccttgccctccggactcagatctcgatagggtaccaatggccagttaacagatccagctgctgctgttctagggttcacaagtctgcctatttgtcttccccaatggagctatggttgtctggtctggtccttggtcgtgtcccgtttcattgtgtactatttacctgtaatgtgtatccttaagtctggtttgatggtgtctgaaacgttttgctgtggtagagcagcatggaagaactataatgaataagtgatccctaatcattgtgtccaaattttgcttctgctatacccttttgtgctgtttcttatgttttgcttaaaaatttgatctgacaaacaaatttgtctaaattatgctcttgttctgactgtgtactgtacacatttgtattgctaccggtttggcacatagttttctctttgattgcagatcaaacccttctgattgcagattgcttggctatggctgatgtgctcactgttcttctttagcttgtatattgctgatggtggcttggctacggctgaaaaagttgctgctgcgccgacttggcaactgttgctccagtaatgctttgtcctctcttcctagccgccgacttggcacttggcagctgttgctcctgtaatgcgttgttatctcttatctcttgagatgtactatgattttgaggctgtttgacttgtgccagattgccagtgctgatgctatattatctcaggtttttatgctagtatatgttttactgtgtgctgcctgtgtcgagttacgtaatctattgaaccgctatgcgtgttgatgccctgttgttgcttgccagattgatgcccctgttgcttgcagcttgcaagctgtagtgaaatcctaaaattcgaaaccaaatctattctgaacttttgaagatctgtgatgtccggaagaaaagattcaaacagataaacgggactctccagaatctataaaataaatgatcgacaaacgctttgctttggtaggcttcctagttagttagcggaccgaagcttcggtccgggcctagaaggccagcttcggccgccccatttcaaatatttttttcaaaataaaagaatgtagtatatagcaattgcttttctgtagtttataacttcgtatagcatacattatacgaagttatacttttctaatatatgaccaaaatttgttgatgtgcaggtcttcgcctaccccggcggcgcgtccatggagatccaccaggcactcacccgctcccccgtcatcgccaaccacctcttccgccacgagcaaggggaggcctttgccgcctccggctacgcgcgctcctcgggccgcgtcggcgtctgcatcgccacctccggccccggcgccaccaacctagtctccgcgctcgccgacgcgctgctcgattccgtccccatggtcgccatcacgggacaggtggcgcgacgcatgattggcaccgacgccttccaggagacgcccatcgtcgaggtcacccgctccatcaccaagcacaactacctggtcctcgacgtcgacgacatcccccgcgtcgtgcaggaggctttcttcctcgcctcctctggtcgaccagggccggtgcttgtcgacatccccaaggacatccagcagcagatggcggtgcctgtctgggacaagcccatgagtctgcctgggtacattgcgcgccttcccaagccccctgcgactgagttgcttgagcaggtgctgcgtcttgttggtgaatcgcggcgccctgttctttatgtgggcggtggctgcgcagcatctggtgaggagttgcgacgctttgtggagctgactggaatcccggtcacaactactcttatgggcctcggcaacttccccagcgacgacccactgtctctgcgcatgctaggtatgcatgggacggtgtatgcaaattatgcagtggataaggccgatctgttgcttgcacttggtgtgcggtttgatgatcgcgtgacagggaagattgaggcttttgcaagcagggctaagattgtgcacgttgatattgatccggctgagattggcaagaacaagcagccacatgtgtccatctgtgcagatgttaagcttgctttgcagggcatgaatgctcttcttgaaggaagcacatcaaagaagagctttgactttggctcatggaacgatgagttggatcagcagaagagggaattcccccttgggtataaaacatctaatgaggagatccagccacaatatgctattcaggttcttgatgagctgacgaaaggcgaggccatcatcggcacaggtgttgggcagcaccagatgtgggcggcacagtactacacttacaagcggccaaggcagtggttgtcttcagctggtcttggggctatgggatttggtttgccggctgctgctggtgcttctgtggcaaacccaggtgtcactgttgttgacatcgatggagatggtagctttctcatgaacgttcaggagctagctatgatccgaattgagaacctcccagtgaaggtctttgtgctaaacaaccagcacctggggatggtggtgcagttggaggacaggttctataaggccaacagagcgcacacatacttgggaaacccagagaatgaaagtgagatatatccagatttcgtgacgatcgccaaagggttcaacattccagcggtccgtgtgacaaagaagaacgaagtccgcgcagcgataaagaagatgctcgagactccagggccgtacctcttggatataatcgtcccacaccaggagcatgtgttgcctatgatccctagtggtggggctttcaaggatatgatcctggatggtgatggcaggactgtgtactgatgactagctagtcagttaacagatctgccagatcctcggtgtacaaataacccgtcttatcctatgagacgggccggcgtcagtgtgttctggaggaatttttatgtcagagcctttttctttgtgtgcttgatgtagatgccaagggaagcttattggctgttgaagcttgatgcaaaataaattatggaactctgttttttgtttatctaataataactagcaaatatgcttccattgcattgaaactaacagccttttgtgtttccaagttttattttgtgacaatgtcatctatttcaattagttgtggaatcggaaacttgcaggactaacttggaaactccaatccctcagcatcctggactttttcctggtgtaatccatgtagatattattttaatcatcattttagttctggaggtttttccatctccggttttgctcccctttcttcaaaaaaaaaaaaaaaatgccgtaggcgccgcaacgcccacctgttgttcaaactcatgggcacgagtggctcgaagattttatacaacaattgctgtagtttcaccgttgctggtgaagaagcatttttttaaaaaaatatagtggtattcattttaattagtttagttgtgcagcgagcaaaatttggacatgctctgctcggaatctgatcgacctagacacagattagcagcagtagctttgtcatctgttccaagagttgcgatctgatagaagaaaaaaaaaccttcccttcaatgtaaaaccgaaactaacaagaaagaagcacagtgccgtttaggcaagtatggagtacgtattaagcatgtagaaggccatgcatgaaccactaacaagaaagaagcgcagtgccattcaggcaagcataagcatgtagattggcatgcatgaacaactaacagtagatcgtctctggtctgattagaagttttttgggaagccaagaaatcatgtacaactggttccatctcaaattccgtggcaaaaagaggcctaagcaacataaagctttccactggttgccatatatgatttgggcatttcactttgatcttaatgggccttgtaaagcccaagactcatgattatctttagttgatgctcttaattaggtgtgggcaaataattcaaactgtatgtacccgaccaaaaccaaagcaaaaataatcgaaccaaaccgaaaatttaaaaataaccgaatgaaaactaaatcctataactgaaagaactgaaaccgaatcaaaatatttaatgtaaccaaaaatatccgaaatataattatattgtcaaaaatattaataatttctagattaaataattaaaaatacttaaaaatttatataaaatagtaaaaatactcgaaaataaccacaaatattcaaaaacaaccgaaatatcccaaaatattcaaagcaaaataaccgaatggataccaaattttaaaaccgaaaaaactggaacaaaaccaaaatcgaaccaaaatttcaaaaatcgaataaatactaaactttagaacaaaaaaaaacgataaccgaatgtatacgaaccaaagccgaattagataaccgaacgtccaggactactcttaatctttccgccacttatgatttgggctattactttgtttataatgagccttttcaagctcaagttcatgattgtccgtgagatgagaaactgacttgttggattcgaaaccctagctagtattggttaatacttaatacataaatgacctgcattgacatcatcatccaagaaaataaaaattgtatgcttgagatatttagttttcctagctaggttttctttattttagtaccgaatctttaggtgtgccacgttaatttagacccattttttcatacttaccaactgagtctagtttaatcatgactataatcgtataaaatgattcagtcgacgtcattgcgaacgtatataaaatcatccaaattgacgtcattccaaagaggtaagcatgcttatctaagagtccgagcatactaaacaagacgacattttatttgcactccaaatcaaattttgtattgcctaaagaaaaacaatcaaactcaagtttcttaaaattaatttcattcaaactaatcactttcaatatctcacatattattcatgccatttctatttgtctaaacatgatttaaaaaaaaaagtaaaatacaaagattactatgcaaaaactctataaaaaaaaattcaaatttcttatttatttgtgacatcaaattttcaaaataatttttttaattatcggttgatccggtcagtcgataaaaacataaactttcagcgaccgttaaaactttcctactaccgatttagagaaaatcttagcttgaaacgtaattgtaacctgccttcatgcaagtcgcaagatatgtcatcctaagttgtatatgttttctcaaaagatgtatttacttgagaaaatacgtttcaacgttgatggacaaccaattaagaatcaagcacctttcgtaatcaatttaggcttatcgtctaaggtatactgatttacgacagttgactagacttataaggaacaaaataatagaatagtttctaaacacttcacctaatcatagagactaagatggtaattcgtaaacgacaaagcctagtgacactgtccattgtaaaattccacatcatattagtattaaacatatacatgtagtttcctgaacacatgtagtatcaaacacacttcgtggcttcttcctcgaaacctgcggccgctcattaattaagtcatctagttgaaggatcgctatcaactttgtatagaaaagttgggccgaattcgagctcggtacggccagaatggcccggaccgaagcttaccggtcaaccaatcaggatttctttgtagggtcgagagaaggaggaagtactctccatgccatgcacgccacagtattgaatgtttttggcatggtcatactagccgtgtgtctctgttccatttggccagccagctccaattatttggcatgatcatcctgtcatactagcagtagcagcgtcatcttcgccgctggccgccccctgcaggctgcagtgtcacacatgcctaatcctgcagtcctgccttttgccttccaaaccgtgtgagccttccgtgcgctcgtcaagtttatgggctgtatttttccgagaggagcctaatgggccaaaagcaaggccttttgggccaatcacgatgggccttaggacactttctaaggcaagaacatgaacctttttctttttctcatattgtcatctgcgtattgtttcatgaagttgctatgcaacgtcacctgaagttgtaaccaactccacgtcacctgaagttgtaaccaactccacgcatataatattggtcctattttgcagagcgtaggttctgttggatctacctgatcaatagttagcggctagtgtaaataaaatagatcctatgatccatctaagtttgaattttcatgtttaataatcagtatgtgactatttaaactaatcttatttgctaatgttttttcgatatagtttaaaggctgtagaatatacttgaacttaggcaaagtggtgaccgagatgatcaacacatcaatcaagacgttagaagccttgatgaaacattcacgagagacgagcaaggagtctaagacgctaagataaataaaacctagaccaaggcatgtggagaaataaagtcaaacaaatgctactcgacaacatccagcttgtccagtactgcaccagaccagcccagagacaaaaagttcaaaagcatgtaaaaagaacgcaacggtaacacaccagatgtgtccggtgctatgccctatgacataaccaacgccacaatgtgcacgatgtgctctagaatgtgaggccagacgcatccggtggcacaacgaacactttactcatctagggttatagagtggattgcaacatgacttggagatgacgacaacttaccgaacgtcacatttgacgacagatctccaatggccaataactgctggaaagccaatagatacgtcacatggacgcaccaaacgtgtttggtgtctatgtaaaatttgttgtgtatccccacgaccacatttacattgggggctatatatacccccttgctagccaaatagagggtggtagagtatgttgaaattgtaggagagtgtcaagacacttcatcaagtgctctaaccacacaaaaaacacttaacaaaagattagatgagcagcatagtgatttttgtgaattgcttatgctagttaaacacatttatttacccttgttgtaggttagggcctagtgtttagtgttgtttgcatagcgctcttaccactcatacactatttttgtacaccaggggcctgaagtcttacaccaatcgtgtttatggtgtgttcgtcaccgtgtgctaaaggaaacgaagcccacaaggaccgattcaggagaagccattttagagacacacttatgtgtagtcaagtcacatgatctattcatagagttattcgacctagagcttgacccttgtacgggaatttatgcgatgagctttaatgaggactaagaaagctaagatacaattaaacttattccgaaaccgacaattaaagacacttcttgggacggagggagtagctgacgttccgtaatgcatgcaagagaagtgaggagggccacgctagagaagagaagtacagaacggaatgagggacggtggcgcatgtccccgcaagatcctgagctgattctaaatcaagcatttgcttgaccaagtctatgcggcgcagagcccgcccgcgccctatgcttgctccggagctctcgttcgttccctgccgcggcagccatcgatcaccggccccaacgctagctttagcttcgcctatttacatacccgagcggagaagagaagagaagagaagcgatcgggattgtgggcgagtgcgtgcgttcgtgcagccacagacaggcgtccgggcacccctaggcgcgccatttaaatatgcgcgaaattctgcatattcagggcggccagtgcggcaaccagattggcagcaaattttgggaagtggtgtgcgatgaacatggcattgatccgaccggccgctatatgggcaccagcgatgtgcagctggaacgcgtgaacgtgtattataacgaagcgagctgcggccgctttgtgccgcgcgcggtgctgatggatctggaaccgggcaccatggatgcggtgcgcaccggcccgtatggccagatttttcgcccggataactttgtgtttggccagagcggcgcgggcaacaactgggcgaaaggccattataccgaaggcgcggaactgattgatagcgtgctggatgtggtgcgcaaagaagcggaaaactgcgattgcctgcagggctttcaggtgtgccatagcctgcacgctggacaccgggaggcaatgcgcgaaattctgcatattcagggcggccagtgcggcaaccagattggcagcaaattttgggaagtggtgtgcgatgaacatggcattgatccgaccggccgctatatgggcaccagcgatgtgcagctggaacgcgtgaacgtgtattataacgaagcgagctgcggccgctttgtgccgcgcgcggtgctgatggatctggaaccgggcaccatggatgcggtgcgcaccggcccgtatggccagatttttcgcccggataactttgtgtttggccagagcggcgcgggcaacaactgggcgaaaggccattataccgaaggcgcggaactgattgatagcgtgctggatgtggtgcgcaaagaagcggaaaactgcgattgcctgcagggctttcaggtgtgccatagcctgatttaaatgcccgggcgatcgctcgaggcgtacctagtggtaccacatggttaacctagacttgtccatcttctggattggccaacttaattaatgtatgaaataaaaggatgcacacatagtgacatgctaatcactataatgtgggcatcaaagttgtgtgttatgtgtaattactagttatctgaataaaagagaaagagatcatccatatttcttatcctaaatgaatgtcacgtgtctttataattctttgatgaaccagatgcatttcattaaccaaatccatatacatataaatattaatcatatataattaatatcaattgggttagcaaaacaaatctagtctaggtgtgttttgcgaatgcggccgccaccgcggtggagctcgaattccggtccgggcctagaaggccagcttcaagtttgtacaaaaaagcaggctccggccagaatggcccggaccgggttaccgaattcgagctcggtaccctgggatccgatatcgatgggccctggccgaagcttggtcacccggtccgggcctagaaggccgatctcccgggcacccagctttcttgtacaaagtggccgttaacggatcggccagaatggcccggaccgaagcttgcatgcctgcagtgcagcgtgacccggtcgtgcccctctctagagataatgagcattgcatgtctaagttataaaaaattaccacatattttttttgtcacacttgtttgaagtgcagtttatctatctttatacatatatttaaactttactctacgaataatataatctatagtactacaataatatcagtgttttagagaatcatataaatgaacagttagacatggtctaaaggacaattgagtattttgacaacaggactctacagttttatctttttagtgtgcatgtgttctcctttttttttgcaaatagcttcacctatataatacttcatccattttattagtacatccatttagggtttagggttaatggtttttatagactaatttttttagtacatctattttattctattttagcctctaaattaagaaaactaaaactctattttagtttttttatttaataatttagatataaaatagaataaaataaagtgactaaaaattaaacaaataccctttaagaaattaaaaaaactaaggaaacatttttcttgtttcgagtagataatgccagcctgttaaacgccgtcgacgagtctaacggacaccaaccagcgaaccagcagcgtcgcgtcgggccaagcgaagcagacggcacggcatctctgtcgctgcctctggacccctctcgagagttccgctccaccgttggacttgctccgctgtcggcatccagaaattgcgtggcggagcggcagacgtgagccggcacggcaggcggcctcctcctcctctcacggcaccggcagctacgggggattcctttcccaccgctccttcgctttcccttcctcgcccgccgtaataaatagacaccccctccacaccctctttccccaacctcgtgttgttcggagcgcacacacacacaaccagatctcccccaaatccacccgtcggcacctccgcttcaaggtacgccgctcgtcctcccccccccccctctctaccttctctagatcggcgttccggtccatgcatggttagggcccggtagttctacttctgttcatgtttgtgttagatccgtgtttgtgttagatccgtgctgctagcgttcgtacacggatgcgacctgtacgtcagacacgttctgattgctaacttgccagtgtttctctttggggaatcctgggatggctctagccgttccgcagacgggatcgatttcatgattttttttgtttcgttgcatagggtttggtttgcccttttcctttatttcaatatatgccgtgcacttgtttgtcgggtcatcttttcatgcttttttttgtcttggttgtgatgatgtggtctggttgggcggtcgttctagatcggagtagaattctgtttcaaactacctggtggatttattaattttggatctgtatgtgtgtgccatacatattcatagttacgaattgaagatgatggatggaaatatcgatctaggataggtatacatgttgatgcgggttttactgatgcatatacagagatgctttttgttcgcttggttgtgatgatgtggtgtggttgggcggtcgttcattcgttctagatcggagtagaatactgtttcaaactacctggtgtatttattaattttggaactgtatgtgtgtgtcatacatcttcatagttacgagtttaagatggatggaaatatcgatctaggataggtatacatgttgatgtgggttttactgatgcatatacatgatggcatatgcagcatctattcatatgctctaaccttgagtacctatctattataataaacaagtatgttttataattattttgatcttgatatacttggatgatggcatatgcagcagctatatgtggatttttttagccctgccttcatacgctatttatttgcttggtactgtttcttttgtcgatgctcaccctgttgtttggtgttacttctgcaggtcgactttaacttagcctaggatccatggcctcctccgagaacgtcatcaccgagttcatgcgcttcaaggtgcgcatggagggcaccgtgaacggccacgagttcgagatcgagggcgagggcgagggccgcccctacgagggccacaacaccgtgaagctgaaggtgaccaagggcggccccctgcccttcgcctgggacatcctgtccccccagttccagtacggctccaaggtgtacgtgaagcaccccgccgacatccccgactacaagaagctgtccttccccgagggcttcaagtgggagcgcgtgatgaacttcgaggacggcggcgtggcgaccgtgacccaggactcctccctgcaggacggctgcttcatctacaaggtgaagttcatcggcgtgaacttcccctccgacggccccgtgatgcagaagaagaccatgggctgggaggcctccaccgagcgcctgtacccccgcgacggcgtgctgaagggcgagacccacaaggccctgaagctgaaggacggcggccactacctggtggagttcaagtccatctacatggccaagaagcccgtgcagctgcccggctactactacgtggacgccaagctggacatcacctcccacaacgaggactacaccatcgtggagcagtacgagcgcaccgagggccgccaccacctgttcctgtagggtaccacatggttaacctagacttgtccatcttctggattggccaacttaattaatgtatgaaataaaaggatgcacacatagtgacatgctaatcactataatgtgggcatcaaagttgtgtgttatgtgtaattactagttatctgaataaaagagaaagagatcatccatatttcttatcctaaatgaatgtcacgtgtctttataattctttgatgaaccagatgcatttcattaaccaaatccatatacatataaatattaatcatatataattaatatcaattgggttagcaaaacaaatctagtctaggtgtgttttgcgaatgcggccgccaccgcggtggagctcgaattccggtccgggcctagaaggccagcttcggccgccccgggcaactttattatacaaagttgatagatcctcatgtcttcatcgtaagcttaaacaggccagaatggcctctggattcagcggcctagaaggccgaagtacttggtcttcctagtcgagtagatcacattcaagcttggtcacccggtccgtcaatattctgattccgatgacttcgtaggttcctagctcaagccgctcgtgtccaagcgtcacttacgattagctaatgattacggcatctaggaccgactagtggcgcgccgactagctagctaaggtaccgagctcgaattcattccgattaatcgtggcctcttgctcttcaggatgaagagctatgtttaaacgtgcaagcgctactagacaattcagtacattaaaaacgtccgcaatgtgttattaagttgtctaagcgtcaatttgtttacaccacaatatatcctgcca

SEQ ID NO: 47 - DNA, 28638 bp, Artificial Sequence
  RV042026
gtttacccgccaatatatcctgtcaaacactgatagtttaaactgaaggcgggaaacgacaatctgatcatgagcggagaattaagggagtcacgttatgacccccgccgatgacgcgggacaagccgttttacgtttggaactgacagaaccgcaacgttgaaggagccactcagcaagctggtacgattgtaatacgactcactatagggcgaattgagcgctgtttaaacgctcttcaactggaagagcggttacgctgtttaaacgctcttcaactggaagagcggttactaccggttcactagctagctgctaatcgagctagttaccctatgaggtgacatgaagcgctcacggttactatgacggttagcttcacgactgttggtggcagtagcgtacgacttagctatagttccggacttacccttaagcgatttaaatctgcggttaccgaattcgagctcggtaccctgggatctgcccttactttaacgcctctaaccaacacccctttatctttataaggaacaataaacagaatttgccccactgttctaaatcacctaataatatccccagctaaaaacaataaaggtttcctagaattaagacaagcatgactgttcctccaggagggtttggaacattgttgcagtcttgcagatacgggcgaagggtgagaaacagagcggagggctggaggtgacctcggtagtcgacgccggagttgagcttgacaacgacggggcggcccctgatggacttgaggaagtccgatggcgtcttcaccgtcccgccggcgcccgaggcgggcctgtcgctgccgccgccgccgctgctcatcttgcgcgctgtgcccccggcggtgtccctgtgttgcggatcgcgggtgggccaggtggatgcgagggcgacccgtttggactccggccggagccgccggatccctggtcggtgtcagtgccgtttactctgggccccacgtgtcagtaccgtctgtagatgacaacaacccgtcgtccacagtcatgtccaaaatatcctttcttcttttttttcgattcggatatctatcttccttttttttttccaaaaatcttcttgacgcaccagcgcgcacgtttgtggtaaacgccgacacgtcggtcccacgtcgatagaccccacccaccagtgagtagcgtgtacgtattcgggggtgacggacgtgtcgccgtcgtcttgctagtcccattcccatctgagccacacatctctgaacaaaaaaaaggagggaggcctccacgcacatccccctccgtgccacccgccccaaaccctcgcgccgcctccgagacagccgccgcaaccatggccaccgccgccgccgcgtctaccgcgctcactggcgccactaccgctgcgcccaaggcgaggcgccgggcgcacctcctggccacccgccgcgccctcgccgcgcccatcaggtgctcagcggcgtcacccgccatgccgatggctcccccggccaccccgctccggccgtggggccccaccgagccccgcaagggtgctgacatcctcgtcgagtccctcgagcgctgcggcgtccgcgacgtaagtttctgcttctacctttgatatatatataataattatcattaattagtagtaatataatatttcaaatatttttttcaaaataaaagaatgtagtatatagcaattgcttttctgtagtttataacttcgtatagcatacattatacgaagttatacttttctaatatatgaccaaaatttgttaccgaattcaggcgacccatcgctgctttgtctacatcatgttcttcatcatcctccccaggcgacgcgtgctgctgttcttattcagactaccgttcgagtgactgcatggcgtacatctttctgcatcgactttgtacggctacatcgaacatatacacgagatgtctcgtgtgaatagagtcactaatgccttaagcatcggttactccgtagggtacattctgttcttcttatttgtgcatatttttattgttgtttactgattatacgagtagttatacatacatgcacatacatatcatcacatatatcacaatatttttctaaattaaattaaaactaaaaatgactaaatttctaacaccaacgacattgtaatgttttctccaacaactttacctattctacattgttctatttcgaatttcactctataaacaacatagtctacaatggaaaacagtgctttgtacgactatatacgcgatgtgtggctacaacataagacaatatagtcgtttgaagattgaacctatatatcggtacggttaatccgtctatgtacgtgggcatgacgaacacccgtgataacgaaggattaacgtgcacaatcataaatccaaagtaggagcggtgcatgatgagaatcgctctcagtactcgacataatgaaccttacgaggtacaacaggcaggcaggcagggaccaggggccgcctttatttcaggctcgctggccccacgggcgtgctgcgtgcacgaagggcactaccccaacctctcaccgaaaaccgcgctggatcggcaaatcaaacgaggtggtgccccgtgcccactctccacgtccacggcaccatccctctgcagccgctcaccagccatgccgtgtcgcggaacggcacaaccacccccaacccactcacgaaaccccgtcccggccgtgcccgtgtcggtccgcgctcggcaacgaggcggcccgcgctgctgagtcccctggacacccgacaccctgtcggccctttgtttattcatcccgaaatctcatctgcccccacggccgactgcgctgcgccgcccggatatatatacccatcgttatcgatcgactggggactctatcagtgatagagtctagaggatcgctcaggaaggccgctgagatagaggcatggcggccaatgcgggcggcggtggagcgggaggaggcagcggcagcggcagcgtggctgcgccggcggtgtgccgccccagcggctcgcggtggacgccgacgccggagcagatcaggatgctgaaggagctctactacggctgcggcatccggtcgcccagctcggagcagatccagcgcatcaccgccatgctgcggcagcacggcaagatcgagggcaagaacgtcttctactggttccagaaccacaaggcccgcgagcgccagaagcgccgcctcaccagcctcgacgtcaacgtgcccgccgccggcgcggccgacgccaccaccagccaactcggcgtcctctcgctgtcgtcgccgccgccttcaggcgcggcgcctccctcgcccaccctcggcttctacgccgccggcaatggcggcggatcggctgtgctgctggacacgagttccgactggggcagcagcggcgctgccatggccaccgagacatgcttcctgcaggactacatgggcgtgacggacacgggcagctcgtcgcagtggccacgcttctcgtcgtcggacacgataatggcggcggccgcggcgcgggcggcgacgacgcgggcgcccgagacgctccctctcttcccgacctgcggcgacgacggcggcagcggtagcagcagctacttgccgttctggggtgccgcgtccacaactgccggcgccacttcttccgttgcgatccagcagcaacaccagctgcaggagcagtacagcttttacagcaacagcaacagcacccagctggccggcaccggcaaccaagacgtatcggcaacagcagcagcagccgccgccctggagctgagcctcagctcatggtgctccccttaccctgctgcagggagtatgtgagagcaacgcgagctgccactgctcttcactggtaccgttaacagatcattcgacaaagcagcattagtccgttgatcggtggaagaccactcgtcagtgttgagttgaatgtttgatcaataaaatacggcaatgctgtaagggttgttttttatgccattgataatacactgtactgttcagttgttgaactctatttcttagccatgccaagtgcttttcttattttgaataacattacagcaaaaagttgaaagacaaaaaaaaaaacccccgaacagagtgctttgggtcccaagcttctttagactgtgttcggcgttccccctaaatttctccccctatatctcactcacttgtcacatcagcgttctctttccccctatatctccacgctctacagcagttccacctatatcaaacctctataccccaccacaacaatattatatactttcatcttcaactaactcatgtaccttccaatttttttctactaataattatttacgtgcacagaaacttagcaaggagagagagagcggggtgacccaccttgctagttggatattacctcttctcttcaaagtatccttgaacgctcaccggttatcaaatctctacactatagctctgtagtcttgctagatagttagttctttagctctcggtgaccaagcttggcgcgatcaagcttatcgataccgtcgacctcgaagcttggtcacccggtccgggcctagaaggccagcttcaagtttgtacaaaaaagcaggctccggccagaatggcccggaccgggttaccgaattcttaccctagctccctgcggctgttacgcggtcccccatcaatcttctgttcttgcggttgtagcctgtgtaacagtgctagagtatgtatgataaataggttttaagtctgcttacatgacattttttattgtggaagagacatataaaaattagagagagtggttctcatgcaacggcggacggcccggtgctaaaagagcttcaagacaaaataatgaaacaggaagagagtagatttatctaagagccaactttattatatgaatgtgtttattgttggctttagatgatatggtaaggagttagagctaataatagataggctctattattattattattaattaaactcgctctaaggaggaaagtgggaggaagggacgaggacgaagactactggaagcatcgtgcatggatgatggatgtggtgtctcttaatgtaggtggccggaggatgtacgtgttaattgcgcgataagcactcagatccaaccgcaaactacctccacactgacacactgatagagagaaagagagacctccgacgactgccgccgcagatgagccacgtacgtatacgacgtctgccggccggctcaggctgccgccatcaccctgctcgaaagtcgcgttaggcggcgccagctacataggagtatctagtctagccagttagtatactactactgcgctgatgatgaattaactctgcatagatactgtacttgcctccctccaacacccaaccacctcctgctcggctcttaataacttggacacggatcgatgccatccaaggaagaacacgacgacgacgacggaacatccaccatgcaagcttgcatccatacgccgatacgcgtgcatccatccatccaccattatttccattttccaccgatcacacgtacacaggcctatttaaggagcgacatcccactgcaactctcctcaccactcatcaccagctagctctagcaaagcacttgccatctaccgaccgccgcattccaaacagcccgacgagctagcagagcggcaggcacctccctcctcaaggaacccatggccactgtgaacaactggctcgctttctccctctccccgcaggagctgccgccctcccagacgacggactccacactcatctcggccgccaccgccgaccatgtctccggcgatgtctgcttcaacatcccccaagattggagcatgaggggatcagagctttcggcgctcgtcgcggagccgaagctggaggacttcctcggcggcatctccttctccgagcagcatcacaaggccaactgcaacatgatacccagcactagcagcacagtttgctacgcgagctcaggtgctagcaccggctaccatcaccagctgtaccaccagcccaccagctcagcgctccacttcgcggactccgtaatggtggcttcctcggccggtgtccacgacggcggtgccatgctcagcgcggccgccgctaacggtgtcgctggcgctgccagtgccaacggcggcggcatcgggctgtccatgattaagaactggctgcggagccaaccggcgcccatgcagccgagggtggcggcggctgagggcgcgcaggggctctctttgtccatgaacatggcggggacgacccaaggcgctgctggcatgccacttctcgctggagagcgcgcacgggcgcccgagagtgtatcgacgtcagcacagggtggagccgtcgtcgtcacggcgccgaaggaggatagcggtggcagcggtgttgccggcgctctagtagccgtgagcacggacacgggtggcagcggcggcgcgtcggctgacaacacggcaaggaagacggtggacacgttcgggcagcgcacgtcgatttaccgtggcgtgacaaggcatagatggactgggagatatgaggcacatctttgggataacagttgcagaagggaagggcaaactcgtaagggtcgtcaagtctatttaggtggctatgataaagaggagaaagctgctagggcttatgatcttgctgctctgaagtactggggtgccacaacaacaacaaattttccagtgagtaactacgaaaaggagctcgaggacatgaagcacatgacaaggcaggagtttgtagcgtctctgagaaggaagagcagtggtttctccagaggtgcatccatttacaggggagtgactaggcatcaccaacatggaagatggcaagcacggattggacgagttgcagggaacaaggatctttacttgggcaccttcagcacccaggaggaggcagcggaggcgtacgacatcgcggcgatcaagttccgcggcctcaacgccgtcaccaacttcgacatgagccgctacgacgtgaagagcatcctggacagcagcgccctccccatcggcagcgccgccaagcgcctcaaggaggccgaggccgcagcgtccgcgcagcaccaccacgccggcgtggtgagctacgacgtcggccgcatcgcctcgcagctcggcgacggcggagccctggcggcggcgtacggcgcgcactaccacggcgccgcctggccgaccatcgcgttccagccgggcgccgccagcacaggcctgtaccacccgtacgcgcagcagccaatgcgcggcggcgggtggtgcaagcaggagcaggaccacgcggtgatcgcggccgcgcacagcctgcaggacctccaccacctgaacctgggcgcggccggcgcgcacgactttttctcggcagggcagcaggccgccgccgctgcgatgcacggcctgggtagcatcgacagtgcgtcgctcgagcacagcaccggctccaactccgtcgtctacaacggcggggtcggcgacagcaacggcgccagcgccgtcggcggcagtggcggtggctacatgatgccgatgagcgctgccggagcaaccactacatcggcaatggtgagccacgagcaggtgcatgcacgggcctacgacgaagccaagcaggctgctcagatggggtacgagagctacctggtgaacgcggagaacaatggtggcggaaggatgtctgcatgggggactgtcgtgtctgcagccgcggcggcagcagcaagcagcaacgacaacatggccgccgacgtcgggcatggcggcgcgcagctcttcagtgtctggaacgacacttaagcgtacctagtggtacctgacatcttatagtctgcaacctctcgtgtctgaattcctatctttatcaagtgttattgcttccacgactataggacagctttcgtcgaaagcttttgctcatgtgatctcgaaggattcatctagtctgatttttcgtgacttgtatcggttttattggattcatccaacatatatcaataaaaaatgagttgtgtttcctttcttcctagttcagttaaaattatttccctcctgcgcttgtgctgtaattgtctgtgtacctgttgtttgtgactgtgttagttcccttggatatgatttcgtatttgatatgtacatggagatagcttagcttcattattggagtatgaagttagtatgacatagtcactctcctggaaaattgacactgcaaaccatatttttattctgaaccacaaatcctagtcagtccgctggcatatgccgtccgtttgctgaatccagaacgtgggtttggagatgtacggctgagatgcctctatgcgaaggggatttcgtggtgaaacgagatgggagtagagcaacgcccgtggaagatgcttcaaacttccacacttttgagcaacgatcggcagtagtaaggtagacgatttcaagatcaaagcatatgaagataaacaacatcaacaacaaaatttgttggggttctatagagagaaacagagctacatacatacactgttttgtatctaccatctgagatgatgaaaagatgaaaaactaaagaatgccccggcgccaacgccaggacacgccgcgcgcgcgtcacccgagccatctcttgacccagccggcgctgtatatttacacacgttgcagcatcgatcaccacctgttcgatcgcgtcgccgtcaccgggatctgagtcgaaacctagacttgtccatcttctggattggccaacttaattaatgtatgaaataaaaggatgcacacatagtgacatgctaatcactataatgtgggcatcaaagttgtgtgttatgtgtaattactagttatctgaataaaagagaaagagatcatccatatttcttatcctaaatgaatgtcacgtgtctttataattctttgatgaaccagatgcatttcattaaccaaatccatatacatataaatattaatcatatataattaatatcaattgggttagcaaaacaaatctagtctaggtgtgttttgcgaatgcgaccttcttatgtgcttctagtctccaaatgtggttgatagttattttgctctaagatcaacagtaatgaagtataaatcatcgttgtggtgtgctactcggttaattgagcattaacacacacaaacatgacgaggatggtataatctccaaaaatgtgtactttgttaggtgggaccctatagccttgattaatgtgctatgttaggcatgcctggaaacgtgtgacgcatatgttttgtgaacctgttgatattatatgtgcttttatattaccatattttattaaaatactaatatttattactagtaagatataacattctatctagcttaaaaactaaccataaatattccataataactagatttaccaaactaatatactaaatatacataataaatacaaaattaacaagacaataatcaatatttatgagcttaatatatttagacattatggttggtcgacgataatcatgctaacttttcgtaattgcttgattgaaatatgcttagaataatgcctctttgttctacatggcaaatagggaccattatggtgtaacaccctgggaaccacaaacaccccgaaatgctactaaactacacaactaaccttcatatataaaatttcgacagcatctcctttgaaaatttgcatagacgtggaagcaacagagtataaacagatatcatgataagaaaacatactagacattaataatctgctagaaatgggaagaatcctaacttgacgactgcgtaactgactagagtcacacttagctgaccctagtcacttacaactgacttcgtgtcctagatcgatgggccctggccgaagcttggtcacccggtccgggcctagaaggccagcttcaagtttgtaccctggagcttgccgagtgccatccttggacactcgataaagtatattttattttttttattttgccaaccaaactttttgtggtatgttcctacactatgtagatctacatgtaccattttggcacaattacatatttacaaaaatgttttctataaatattagatttagttcgtttatttgaatttcttcggaaaattcacatttaaactgcaagtcactcgaaacatggaaaaccgtgcatgcaaaataaatgatatgcatgttatctagcacaagttacgaccgatttcagaagcagaccagaatcttcaagcaccatgctcactaaacatgaccgtgaacttgttatctagttgtttaaaaattgtataaaacacaaataaagtcagaaattaatgaaacttgtccacatgtcatgatatcatatatagaggttgtgataaaaatttgataatgtttcggtaaagttgtgacgtactatgtgtagaaacctaagtgacctacacataaaatcatagagtttcaatgtagttcactcgacaaagactttgtcaagtgtccgataaaaagtactcgacaaagaagccgttgtcgatgtactgttcgtcgagatctctttgtcgagtgtcacactaggcaaagtctttacggagtgtttttcaggctttgacactcggcaaagcgctcgattccagtagtgacagtaatttgcatcaaaaatagctgagagatttaggccccgtttcaatctcacgggataaagtttagcttcctgctaaactttagctatatgaattgaagtgctaaagtttagtttcaattaccaccattagctctcctgtttagattacaaatggctaaaagtagctaaaaaatagctgctaaagtttatctcgcgagattgaaacagggccttaaaatgagtcaactaatagaccaactaattattagctattagtcgttagcttctttaatctaagctaaaaccaactaatagcttatttgttgaattacaattagctcaacggaattctctgtttttctaaaaaaaaactgcccctctcttacagcaaattgtccgctgcccgtcgtccagatacaatgaacgtacctagtaggaactcttttacacgctcggtcgctcgccgcggatcggagtccccggaacacgacaccactgtggaacacgacaaagtctgctcagaggcggccacaccctggcgtgcaccgagccggagcccggataagcacggtaaggagagtacggcgggacgtggcgacccgtgtgtctgctgccacgcagccttcctccacgtagccgcgcggccgcgccacgtaccagggcccggcgctggtataaatgcgcgccacctccgctttagttctgcatacagccaacccaaggatgtccaacctgctcacggttcaccagaaccttccggctcttccagtggacgcgacgtccgatgaagtcaggaagaacctcatggacatgttccgcgacaggcaagcgttcagcgagcacacctggaagatgctgctctccgtctgccgctcctgggctgcatggtgcaagctgaacaacaggaagtggttccccgctgagcccgaggacgtgagggattaccttctgtacctgcaagcgcgaggtttgtttctgcttctacctttgatatatatataataattatcattaattagtagtaatataatatttcaaatatttttttcaaaataaaagaatgtagtatatagcaattgcttttctgtagtttataagtgtgtatattttaatttataacttttctaatatatgaccaaaacatggtgatgcctaggtctggcagtgaagaccatccagcaacaccttggacaactgaacatgcttcacaggcgctccggcctcccgcgccccagcgactcgaacgccgtgagcctcgtcatgcgccgcatcaggaaggaaaacgtcgatgccggcgaaagggcaaagcaggccctcgcgttcgagaggaccgatttcgaccaggtccgcagcctgatggagaacagcgacaggtgccaggacattaggaacctggcgttcctcggaattgcatacaacacgctcctcaggatcgcggaaattgcccgcattcgcgtgaaggacattagccgcaccgacggcggcaggatgcttatccacattggcaggaccaagacgctcgtttccaccgcaggcgtcgaaaaggccctcagcctcggagtgaccaagctcgtcgaacgctggatctccgtgtccggcgtcgcggacgacccaaacaactacctcttctgccgcgtccgcaagaacggggtggctgcccctagcgccaccagccaactcagcacgagggccttggaaggtattttcgaggccacccaccgcctgatctacggcgcgaaggatgacagcggtcaacgctacctcgcatggtccgggcactccgcccgcgttggagctgctagggacatggcccgcgccggtgtttccatccccgaaatcatgcaggcgggtggatggacgaacgtgaacattgtcatgaactacattcgcaaccttgacagcgagacgggcgcaatggttcgcctcctggaagatggtgactgagctagacccagctttcttgtacaaagtggccgttaacggatccagacttgtccatcttctggattggccaacttaattaatgtatgaaataaaaggatgcacacatagtgacatgctaatcactataatgtgggcatcaaagttgtgtgttatgtgtaattactagttatctgaataaaagagaaagagatcatccatatttcttatcctaaatgaatgtcacgtgtctttataattctttgatgaaccagatgcatttcattaaccaaatccatatacatataaatattaatcatatataattaatatcaattgggttagcaaaacaaatctagtctaggtgtgttttgcgaattgcggcaagctgttaccgaattcctgcccttaaggccaattgttcaagattcattcaacaattgaaacatctcccatgattaaatcagtataaggttgctatggtcttgcttgacaaagtttttttttgagggaatttcaactaaatttttgagtgaaactatcaaatactgattttaaaaaatttttataaaaggaagcgcagagataaaaggccatctatgctacaaaagtacccaaaaatgtaatcctaaagtatgaattgcattttttttttgtttggacgaaaggaaaggagtattaccacaagaatgatatcatcttcatatttagatcttttttgggtaaagcttgagattctctaaatatagagaaatcagaagaaaaaaaaaccgtgttttggtggttttgatttctagcctccacaataactttgacggcgtcgacaagtctaacggacaccaagcagcgaaccaccagcgccgagccaagcgaagcagacggccgagacgttgacaccttcggcgcggcatctctcgagagttccgctccggcgctccacctccaccgctggcggtttcttattccgttccgttccgcctcctgctctgctcctctccacaccacacggcacgaaaccgttacggcaccggcagcacccagcacgggagaggggattcctttcccaccgttccttccctttccgccccgccgctataaatagccagccccatccccagcttttttccccaatctcatctcctctctcctgttgttcggagcacacgcacaatccgatcgatccccaaatccccttcgtctctcctcgcgagcctcgtggatcccagcttcaaggtacggcgatcgatcatcccccctccttctctctaccttcttttctctagactacatcggatggcgatccatggttagggcctgctagtttcccttcctgttttgtcgatggctgcgaggcacaatagatctgatggcgttatgacggctaacttgtcatgttgttgcgatttatagtccctttaggagatcagtttaatttctcggatggttcgagatcggtggtccatggttagtaccctaagatccgcgctgttagggttcgtagatggaggcgacctgttctgattgttaacttgtcagtacctgggaaatcctgggatggttctagctcgtccgcagatgagatcgatttcatgatcctctgtatcttgtttcgttgcctaggttccgtctaatctatccgtggtatgatgtagatgttttgatcgtgctaactacgtcttgtaaagttaattgtcaggtcataatttttagcatgcctttttttttgtttggttttgtctaattgggctgtcgttctagatcagagtagaagactgttccaaactacctgctggatttattgaacttggatctgtatgtgtgtcacatatcttcataaattcatgattaagatggattgaaatatcttttatctttttggtatggatagttctatatgttggtgtggctttgttagatgtatacatgcttagatacatgaagcaacgtgctgctactgtttagtaattgctgttcatttgtctaataaacagataaggatatgtatttatgttgctgttggttttgctggtactttgttggatacaaatgcttcaatacagaaaacagcatgctgctacgatttaccatttatctaatcttatcatatgtctaatctaataaacaaacatgcttttaaattatcttcatatgcttggatgatggcatacacagcggctatgtgtggttttttaaatacccagcatcatgggcatgcatgacactgctttaatatgctttttatttgcttgagactgtttcttttgtttatactgaccctttagttcggtgactcttctgcaggtcgactttaacttagcctaggatccatggcccagtccaagcacggcctgaccaaggagatgaccatgaagtaccgcatggagggctgcgtggacggccacaagttcgtgatcaccggcgagggcatcggctaccccttcaagggcaagcaggccatcaacctgtgcgtggtggagggcggccccttgcccttcgccgaggacatcttgtccgccgccttcatgtacggcaaccgcgtgttcaccgagtacccccaggacatcgtcgactacttcaagaactcctgccccgccggctacacctgggaccgctccttcctgttcgaggacggcgccgtgtgcatctgcaacgccgacatcaccgtgagcgtggaggagaactgcatgtaccacgagtccaagttctacggcgtgaacttccccgccgacggccccgtgatgaagaagatgaccgacaactgggagccctcctgcgagaagatcatccccgtgcccaagcagggcatcttgaagggcgacgtgagcatgtacctgctgctgaaggacggtggccgcttgcgctgccagttcgacaccgtgtacaaggccaagtccgtgccccgcaagatgcccgactggcacttcatccagcacaagctgacccgcgaggaccgcagcgacgccaagaaccagaagtggcacctgaccgagcacgccatcgcctccggctccgccttgccctccggactcagatctcgatagggtaccaatggccagttaacagatccagctgctgctgttctagggttcacaagtctgcctatttgtcttccccaatggagctatggttgtctggtctggtccttggtcgtgtcccgtttcattgtgtactatttacctgtaatgtgtatccttaagtctggtttgatggtgtctgaaacgttttgctgtggtagagcagcatggaagaactataatgaataagtgatccctaatcattgtgtccaaattttgcttctgctatacccttttgtgctgtttcttatgttttgcttaaaaatttgatctgacaaacaaatttgtctaaattatgctcttgttctgactgtgtactgtacacatttgtattgctaccggtttggcacatagttttctctttgattgcagatcaaacccttctgattgcagattgcttggctatggctgatgtgctcactgttcttctttagcttgtatattgctgatggtggcttggctacggctgaaaaagttgctgctgcgccgacttggcaactgttgctccagtaatgctttgtcctctcttcctagccgccgacttggcacttggcagctgttgctcctgtaatgcgttgttatctcttatctcttgagatgtactatgattttgaggctgtttgacttgtgccagattgccagtgctgatgctatattatctcaggtttttatgctagtatatgttttactgtgtgctgcctgtgtcgagttacgtaatctattgaaccgctatgcgtgttgatgccctgttgttgcttgccagattgatgcccctgttgcttgcagcttgcaagctgtagtgaaatcctaaaattcgaaaccaaatctattctgaacttttgaagatctgtgatgtccggaagaaaagattcaaacagataaacgggactctccagaatctataaaataaatgatcgacaaacgctttgctttggtaggcttcctagttagttagcggaccgaagcttcggtccgggcctagaaggccagcttcggccgccccatttcaaatatttttttcaaaataaaagaatgtagtatatagcaattgcttttctgtagtttataacttcgtatagcatacattatacgaagttatacttttctaatatatgaccaaaatttgttgatgtgcaggtcttcgcctaccccggcggcgcgtccatggagatccaccaggcactcacccgctcccccgtcatcgccaaccacctcttccgccacgagcaaggggaggcctttgccgcctccggctacgcgcgctcctcgggccgcgtcggcgtctgcatcgccacctccggccccggcgccaccaacctagtctccgcgctcgccgacgcgctgctcgattccgtccccatggtcgccatcacgggacaggtggcgcgacgcatgattggcaccgacgccttccaggagacgcccatcgtcgaggtcacccgctccatcaccaagcacaactacctggtcctcgacgtcgacgacatcccccgcgtcgtgcaggaggctttcttcctcgcctcctctggtcgaccagggccggtgcttgtcgacatccccaaggacatccagcagcagatggcggtgcctgtctgggacaagcccatgagtctgcctgggtacattgcgcgccttcccaagccccctgcgactgagttgcttgagcaggtgctgcgtcttgttggtgaatcgcggcgccctgttctttatgtgggcggtggctgcgcagcatctggtgaggagttgcgacgctttgtggagctgactggaatcccggtcacaactactcttatgggcctcggcaacttccccagcgacgacccactgtctctgcgcatgctaggtatgcatgggacggtgtatgcaaattatgcagtggataaggccgatctgttgcttgcacttggtgtgcggtttgatgatcgcgtgacagggaagattgaggcttttgcaagcagggctaagattgtgcacgttgatattgatccggctgagattggcaagaacaagcagccacatgtgtccatctgtgcagatgttaagcttgctttgcagggcatgaatgctcttcttgaaggaagcacatcaaagaagagctttgactttggctcatggaacgatgagttggatcagcagaagagggaattcccccttgggtataaaacatctaatgaggagatccagccacaatatgctattcaggttcttgatgagctgacgaaaggcgaggccatcatcggcacaggtgttgggcagcaccagatgtgggcggcacagtactacacttacaagcggccaaggcagtggttgtcttcagctggtcttggggctatgggatttggtttgccggctgctgctggtgcttctgtggcaaacccaggtgtcactgttgttgacatcgatggagatggtagctttctcatgaacgttcaggagctagctatgatccgaattgagaacctcccagtgaaggtctttgtgctaaacaaccagcacctggggatggtggtgcagttggaggacaggttctataaggccaacagagcgcacacatacttgggaaacccagagaatgaaagtgagatatatccagatttcgtgacgatcgccaaagggttcaacattccagcggtccgtgtgacaaagaagaacgaagtccgcgcagcgataaagaagatgctcgagactccagggccgtacctcttggatataatcgtcccacaccaggagcatgtgttgcctatgatccctagtggtggggctttcaaggatatgatcctggatggtgatggcaggactgtgtactgatgactagctagtcagttaacagatctgccagatcctcggtgtacaaataacccgtcttatcctatgagacgggccggcgtcagtgtgttctggaggaatttttatgtcagagcctttttctttgtgtgcttgatgtagatgccaagggaagcttattggctgttgaagcttgatgcaaaataaattatggaactctgttttttgtttatctaataataactagcaaatatgcttccattgcattgaaactaacagccttttgtgtttccaagttttattttgtgacaatgtcatctatttcaattagttgtggaatcggaaacttgcaggactaacttggaaactccaatccctcagcatcctggactttttcctggtgtaatccatgtagatattattttaatcatcattttagttctggaggtttttccatctccggttttgctcccctttcttcaaaaaaaaaaaaaaaatgccgtaggcgccgcaacgcccacctgttgttcaaactcatgggcacgagtggctcgaagattttatacaacaattgctgtagtttcaccgttgctggtgaagaagcatttttttaaaaaaatatagtggtattcattttaattagtttagttgtgcagcgagcaaaatttggacatgctctgctcggaatctgatcgacctagacacagattagcagcagtagctttgtcatctgttccaagagttgcgatctgatagaagaaaaaaaaaccttcccttcaatgtaaaaccgaaactaacaagaaagaagcacagtgccgtttaggcaagtatggagtacgtattaagcatgtagaaggccatgcatgaaccactaacaagaaagaagcgcagtgccattcaggcaagcataagcatgtagattggcatgcatgaacaactaacagtagatcgtctctggtctgattagaagttttttgggaagccaagaaatcatgtacaactggttccatctcaaattccgtggcaaaaagaggcctaagcaacataaagctttccactggttgccatatatgatttgggcatttcactttgatcttaatgggccttgtaaagcccaagactcatgattatctttagttgatgctcttaattaggtgtgggcaaataattcaaactgtatgtacccgaccaaaaccaaagcaaaaataatcgaaccaaaccgaaaatttaaaaataaccgaatgaaaactaaatcctataactgaaagaactgaaaccgaatcaaaatatttaatgtaaccaaaaatatccgaaatataattatattgtcaaaaatattaataatttctagattaaataattaaaaatacttaaaaatttatataaaatagtaaaaatactcgaaaataaccacaaatattcaaaaacaaccgaaatatcccaaaatattcaaagcaaaataaccgaatggataccaaattttaaaaccgaaaaaactggaacaaaaccaaaatcgaaccaaaatttcaaaaatcgaataaatactaaactttagaacaaaaaaaaacgataaccgaatgtatacgaaccaaagccgaattagataaccgaacgtccaggactactcttaatctttccgccacttatgatttgggctattactttgtttataatgagccttttcaagctcaagttcatgattgtccgtgagatgagaaactgacttgttggattcgaaaccctagctagtattggttaatacttaatacataaatgacctgcattgacatcatcatccaagaaaataaaaattgtatgcttgagatatttagttttcctagctaggttttctttattttagtaccgaatctttaggtgtgccacgttaatttagacccattttttcatacttaccaactgagtctagtttaatcatgactataatcgtataaaatgattcagtcgacgtcattgcgaacgtatataaaatcatccaaattgacgtcattccaaagaggtaagcatgcttatctaagagtccgagcatactaaacaagacgacattttatttgcactccaaatcaaattttgtattgcctaaagaaaaacaatcaaactcaagtttcttaaaattaatttcattcaaactaatcactttcaatatctcacatattattcatgccatttctatttgtctaaacatgatttaaaaaaaaaagtaaaatacaaagattactatgcaaaaactctataaaaaaaaattcaaatttcttatttatttgtgacatcaaattttcaaaataatttttttaattatcggttgatccggtcagtcgataaaaacataaactttcagcgaccgttaaaactttcctactaccgatttagagaaaatcttagcttgaaacgtaattgtaacctgccttcatgcaagtcgcaagatatgtcatcctaagttgtatatgttttctcaaaagatgtatttacttgagaaaatacgtttcaacgttgatggacaaccaattaagaatcaagcacctttcgtaatcaatttaggcttatcgtctaaggtatactgatttacgacagttgactagacttataaggaacaaaataatagaatagtttctaaacacttcacctaatcatagagactaagatggtaattcgtaaacgacaaagcctagtgacactgtccattgtaaaattccacatcatattagtattaaacatatacatgtagtttcctgaacacatgtagtatcaaacacacttcgtggcttcttcctcgaaacctgcggccgctcattaattaagtcatctagttgaaggatcgctatcaactttgtatagaaaagttgggccgaattcgagctcggtacggccagaatggcccggaccgaagcttatcttgcaagagcatccggccggatattgctttgcaaagatttgctagctagcagcacatgagatcgagttatgatctccaggtgtactcatgctctccttatgtttggatatactgatcttggatatctatagaagatccccaggtacaagatcaatgacatacttctgcacacttcgtgggattgtacagaatgatatactacatactgaaggtatgtggtggtcatgattttatatcattgaccttattatctataaagataatattacttggtgttgtttagatgaaaaacaagttacaaactaagtctctaccttacttcacattttaaatgtgtttgagagcaggtatgggatgacttagtaatttgcaaagatcagggggagtttcctcttgatcgaaagaacttgtttatacatcatggtgtactcttttctttgcatgagttttcccctgtttgggtttctcattcaaagtttttaacgaggcaacatcaacataaggcctatgtcgtatcatctatttttcccgtagaggttttcgaggatgatacattatggcatagttattgttgtatttgaactaggtgataagtttatctccctagagttcaaatgaatcaacaatagagtatgactactctccttatttctcccactgggtttttaaggagactcagctaatatgttgatttctcagattttctggcaagattatcttggagaaatattagcctgagttatatgtctcatcatttattttccccactggggtttttgagatgatgactatagacatgttattgttctttggtctagaggtccattggagaacaatatcgtaccatggttcaattgaaccaccgacaattatctataaggataattgagcttgtgttgttcagatggaaacaggttatatgaggagcaacatattgctcctaaattgttttatccccatgaacttcaggaaaatgaagatataaacatcttgcaaacaaagtcttgtgataatcttgctgatctattcacaaaatctctaccatactcaacgttttcagaaatgtgttgaggtgattggtatgagaagactcaagtgtttgcaagatcagggggagtaattctccgtgatatttgacctgttttataccatcatattacactcttttctttgtatgagttttgccttgttaaggttttctcatccaaagtttttaacgaggtaatatcaactaagctatatgcttcatcattcactttttcccacaggggtttttatgcatgatgattacaagcatattcttttggagttcaatatgagttttactcataatccaaaagacattgtgtactccttatttttcccacagggtttttgaggagatgatatattggaagacaacttgcagatgatctagtggacttggattgatcaagggggagtgttacaaaatattgtcatgtgatcaaccctctcccctgacagttttctttcaagggacacaccccttgggagacactgtatccacatgtatataaaccagattatctgcaataaagatctacaactgtcatttgtctctctctcaatctcgttactactgagtatactataacaggttcgaccaaaaatagcaaatggtggtctggcttctcgtcatgcatggttttacacgtgtacaggcgagaaagctcatcttaacaaatttaataacccaaatatatatgcatagaaatacccgaccatttgtttgttgagctagcgtgtggctcgcctttggcctcgcctgacctcaccttatatttctaataataccacgtctccctccttatatttaccctcttctcccaagagaaaaatcgggctccaatgcaaacaccagttttctaccctaaacacaagaacccagatgcataataaaaggtgaaagctagcagaagaggtacctaactctaccctactatagagaaaaagtcagcacattgcaagcaataataggatccatggcgcccagcagctacgaggtggcggcttccatcctcctctgcgccgaggacagcagcagcatcctggacctcgaagcggaggccgaggaggaagcgctactggcgcggagcggggagcccggcggcggcgcggagttccccgtgccgtccgaggaatgcgtcgccggtttcctggagtctgaggcagcgcacatgccgcgggaggactacgccgagaggctgcgcagcggggggatggatctccgcgtccggacggacgccatcgactggatttggaaggttcacacgtgctacggtttcggccctctcactgcctgcttggccgtcaactacctggaccgcttcctctcgctctaccagcttccggaaggcaaggcttggatgacacagctgctgtccgtggcgtgcttgtccctggccgccaagatggaggagacctacgtcccttcgtccctggacctgcaggccggggacgcgcggtacgtgttcgaggcgaagacgatccagaggatggagctcctggtcctcagcacgctcaagtggaggatgcaagcggtcacccccttgtcgtacgtcgactacttcctccaccggctccgaggcggcgccgcgccgagcagacgcgccgtcctccgatccgcggagctcatcctgtgcatcgccagagggacgcactgcttggatttcaggccctcggagatcgccttggccgtcgccgccaccgtggccggcgaagagcgcgccgtggacatcgacagggccttcacccaccgtgtacataaggagagggtgtcgcgatgcctcgaagcgatccagcaggccaccgccaccatggccctgccgcagccgctgaaaagtgaaggcccgagcagcagcggccgcagggcctcgtcttcctcggccaccgtgccgcggagccccaccggggtgctggacgctggctgcctgagctacaggagagccgccgccgccgccgcctcgcacgcgagctccagctggcgcgacgaggacgacgacgactgccccccggctgtctgcagcaagaggaggaagattagcagatgaatttaaatgcccgggcgatcgctcgaggcgtacctagtggtaccacatggttaacctagacttgtccatcttctggattggccaacttaattaatgtatgaaataaaaggatgcacacatagtgacatgctaatcactataatgtgggcatcaaagttgtgtgttatgtgtaattactagttatctgaataaaagagaaagagatcatccatatttcttatcctaaatgaatgtcacgtgtctttataattctttgatgaaccagatgcatttcattaaccaaatccatatacatataaatattaatcatatataattaatatcaattgggttagcaaaacaaatctagtctaggtgtgttttgcgaatgcggccgccaccgcggtggagctcgaattccggtccgggcctagaaggccagcttcaagtttgtacaaaaaagcaggctccggccagaatggcccggaccgggttaccgaattcgagctcggtaccctgggatccgatatcgatgggccctggccgaagcttggtcacccggtccgggcctagaaggccgatctcccgggcacccagctttcttgtacaaagtggccgttaacggatcggccagaatggcccggaccgaagcttgcatgcctgcagtgcagcgtgacccggtcgtgcccctctctagagataatgagcattgcatgtctaagttataaaaaattaccacatattttttttgtcacacttgtttgaagtgcagtttatctatctttatacatatatttaaactttactctacgaataatataatctatagtactacaataatatcagtgttttagagaatcatataaatgaacagttagacatggtctaaaggacaattgagtattttgacaacaggactctacagttttatctttttagtgtgcatgtgttctcctttttttttgcaaatagcttcacctatataatacttcatccattttattagtacatccatttagggtttagggttaatggtttttatagactaatttttttagtacatctattttattctattttagcctctaaattaagaaaactaaaactctattttagtttttttatttaataatttagatataaaatagaataaaataaagtgactaaaaattaaacaaataccctttaagaaattaaaaaaactaaggaaacatttttcttgtttcgagtagataatgccagcctgttaaacgccgtcgacgagtctaacggacaccaaccagcgaaccagcagcgtcgcgtcgggccaagcgaagcagacggcacggcatctctgtcgctgcctctggacccctctcgagagttccgctccaccgttggacttgctccgctgtcggcatccagaaattgcgtggcggagcggcagacgtgagccggcacggcaggcggcctcctcctcctctcacggcaccggcagctacgggggattcctttcccaccgctccttcgctttcccttcctcgcccgccgtaataaatagacaccccctccacaccctctttccccaacctcgtgttgttcggagcgcacacacacacaaccagatctcccccaaatccacccgtcggcacctccgcttcaaggtacgccgctcgtcctcccccccccccctctctaccttctctagatcggcgttccggtccatgcatggttagggcccggtagttctacttctgttcatgtttgtgttagatccgtgtttgtgttagatccgtgctgctagcgttcgtacacggatgcgacctgtacgtcagacacgttctgattgctaacttgccagtgtttctctttggggaatcctgggatggctctagccgttccgcagacgggatcgatttcatgattttttttgtttcgttgcatagggtttggtttgcccttttcctttatttcaatatatgccgtgcacttgtttgtcgggtcatcttttcatgcttttttttgtcttggttgtgatgatgtggtctggttgggcggtcgttctagatcggagtagaattctgtttcaaactacctggtggatttattaattttggatctgtatgtgtgtgccatacatattcatagttacgaattgaagatgatggatggaaatatcgatctaggataggtatacatgttgatgcgggttttactgatgcatatacagagatgctttttgttcgcttggttgtgatgatgtggtgtggttgggcggtcgttcattcgttctagatcggagtagaatactgtttcaaactacctggtgtatttattaattttggaactgtatgtgtgtgtcatacatcttcatagttacgagtttaagatggatggaaatatcgatctaggataggtatacatgttgatgtgggttttactgatgcatatacatgatggcatatgcagcatctattcatatgctctaaccttgagtacctatctattataataaacaagtatgttttataattattttgatcttgatatacttggatgatggcatatgcagcagctatatgtggatttttttagccctgccttcatacgctatttatttgcttggtactgtttcttttgtcgatgctcaccctgttgtttggtgttacttctgcaggtcgactttaacttagcctaggatccatggcctcctccgagaacgtcatcaccgagttcatgcgcttcaaggtgcgcatggagggcaccgtgaacggccacgagttcgagatcgagggcgagggcgagggccgcccctacgagggccacaacaccgtgaagctgaaggtgaccaagggcggccccctgcccttcgcctgggacatcctgtccccccagttccagtacggctccaaggtgtacgtgaagcaccccgccgacatccccgactacaagaagctgtccttccccgagggcttcaagtgggagcgcgtgatgaacttcgaggacggcggcgtggcgaccgtgacccaggactcctccctgcaggacggctgcttcatctacaaggtgaagttcatcggcgtgaacttcccctccgacggccccgtgatgcagaagaagaccatgggctgggaggcctccaccgagcgcctgtacccccgcgacggcgtgctgaagggcgagacccacaaggccctgaagctgaaggacggcggccactacctggtggagttcaagtccatctacatggccaagaagcccgtgcagctgcccggctactactacgtggacgccaagctggacatcacctcccacaacgaggactacaccatcgtggagcagtacgagcgcaccgagggccgccaccacctgttcctgtagggtaccacatggttaacctagacttgtccatcttctggattggccaacttaattaatgtatgaaataaaaggatgcacacatagtgacatgctaatcactataatgtgggcatcaaagttgtgtgttatgtgtaattactagttatctgaataaaagagaaagagatcatccatatttcttatcctaaatgaatgtcacgtgtctttataattctttgatgaaccagatgcatttcattaaccaaatccatatacatataaatattaatcatatataattaatatcaattgggttagcaaaacaaatctagtctaggtgtgttttgcgaatgcggccgccaccgcggtggagctcgaattccggtccgggcctagaaggccagcttcggccgccccgggcaactttattatacaaagttgatagatcctcatgtcttcatcgtaagcttaaacaggccagaatggcctctggattcagcggcctagaaggccgaagtacttggtcttcctagtcgagtagatcacattcaagcttggtcacccggtccgtcaatattctgattccgatgacttcgtaggttcctagctcaagccgctcgtgtccaagcgtcacttacgattagctaatgattacggcatctaggaccgactagtggcgcgccgactagctagctaaggtaccgagctcgaattcattccgattaatcgtggcctcttgctcttcaggatgaagagctatgtttaaacgtgcaagcgctactagacaattcagtacattaaaaacgtccgcaatgtgttattaagttgtctaagcgtcaatttgtttacaccacaatatatcctgcca

SEQ ID NO: 48 - DNA, 29157 bp, Artificial Sequence
  RX000017
gtttacccgccaatatatcctgtcaaacactgatagtttaaactgaaggcgggaaacgacaatctgatcatgagcggagaattaagggagtcacgttatgacccccgccgatgacgcgggacaagccgttttacgtttggaactgacagaaccgcaacgttgaaggagccactcagcaagctggtacgattgtaatacgactcactatagggcgaattgagcgctgtttaaacgctcttcaactggaagagcggttacgctgtttaaacgctcttcaactggaagagcggttactaccggttcactagctagctgctaatcgagctagttaccctatgaggtgacatgaagcgctcacggttactatgacggttagcttcacgactgttggtggcagtagcgtacgacttagctatagttccggacttacccttaagcgatttaaatctgcggttaccgaattcgagctcggtaccctgggatctgcccttactttaacgcctctaaccaacacccctttatctttataaggaacaataaacagaatttgccccactgttctaaatcacctaataatatccccagctaaaaacaataaaggtttcctagaattaagacaagcatgactgttcctccaggagggtttggaacattgttgcagtcttgcagatacgggcgaagggtgagaaacagagcggagggctggaggtgacctcggtagtcgacgccggagttgagcttgacaacgacggggcggcccctgatggacttgaggaagtccgatggcgtcttcaccgtcccgccggcgcccgaggcgggcctgtcgctgccgccgccgccgctgctcatcttgcgcgctgtgcccccggcggtgtccctgtgttgcggatcgcgggtgggccaggtggatgcgagggcgacccgtttggactccggccggagccgccggatccctggtcggtgtcagtgccgtttactctgggccccacgtgtcagtaccgtctgtagatgacaacaacccgtcgtccacagtcatgtccaaaatatcctttcttcttttttttcgattcggatatctatcttccttttttttttccaaaaatcttcttgacgcaccagcgcgcacgtttgtggtaaacgccgacacgtcggtcccacgtcgatagaccccacccaccagtgagtagcgtgtacgtattcgggggtgacggacgtgtcgccgtcgtcttgctagtcccattcccatctgagccacacatctctgaacaaaaaaaaggagggaggcctccacgcacatccccctccgtgccacccgccccaaaccctcgcgccgcctccgagacagccgccgcaaccatggccaccgccgccgccgcgtctaccgcgctcactggcgccactaccgctgcgcccaaggcgaggcgccgggcgcacctcctggccacccgccgcgccctcgccgcgcccatcaggtgctcagcggcgtcacccgccatgccgatggctcccccggccaccccgctccggccgtggggccccaccgagccccgcaagggtgctgacatcctcgtcgagtccctcgagcgctgcggcgtccgcgacgtaagtttctgcttctacctttgatatatatataataattatcattaattagtagtaatataatatttcaaatatttttttcaaaataaaagaatgtagtatatagcaattgcttttctgtagtttataacttcgtatagcatacattatacgaagttatacttttctaatatatgaccaaaatttgttaccgaattcaggcgacccatcgctgctttgtctacatcatgttcttcatcatcctccccaggcgacgcgtgctgctgttcttattcagactaccgttcgagtgactgcatggcgtacatctttctgcatcgactttgtacggctacatcgaacatatacacgagatgtctcgtgtgaatagagtcactaatgccttaagcatcggttactccgtagggtacattctgttcttcttatttgtgcatatttttattgttgtttactgattatacgagtagttatacatacatgcacatacatatcatcacatatatcacaatatttttctaaattaaattaaaactaaaaatgactaaatttctaacaccaacgacattgtaatgttttctccaacaactttacctattctacattgttctatttcgaatttcactctataaacaacatagtctacaatggaaaacagtgctttgtacgactatatacgcgatgtgtggctacaacataagacaatatagtcgtttgaagattgaacctatatatcggtacggttaatccgtctatgtacgtgggcatgacgaacacccgtgataacgaaggattaacgtgcacaatcataaatccaaagtaggagcggtgcatgatgagaatcgctctcagtactcgacataatgaaccttacgaggtacaacaggcaggcaggcagggaccaggggccgcctttatttcaggctcgctggccccacgggcgtgctgcgtgcacgaagggcactaccccaacctctcaccgaaaaccgcgctggatcggcaaatcaaacgaggtggtgccccgtgcccactctccacgtccacggcaccatccctctgcagccgctcaccagccatgccgtgtcgcggaacggcacaaccacccccaacccactcacgaaaccccgtcccggccgtgcccgtgtcggtccgcgctcggcaacgaggcggcccgcgctgctgagtcccctggacacccgacaccctgtcggccctttgtttattcatcccgaaatctcatctgcccccacggccgactgcgctgcgccgcccggatatatatacccatcgttatcgatcgactggggactctatcagtgatagagtctagaggatcgctcaggaaggccgctgagatagaggcatggcggccaatgcgggcggcggtggagcgggaggaggcagcggcagcggcagcgtggctgcgccggcggtgtgccgccccagcggctcgcggtggacgccgacgccggagcagatcaggatgctgaaggagctctactacggctgcggcatccggtcgcccagctcggagcagatccagcgcatcaccgccatgctgcggcagcacggcaagatcgagggcaagaacgtcttctactggttccagaaccacaaggcccgcgagcgccagaagcgccgcctcaccagcctcgacgtcaacgtgcccgccgccggcgcggccgacgccaccaccagccaactcggcgtcctctcgctgtcgtcgccgccgccttcaggcgcggcgcctccctcgcccaccctcggcttctacgccgccggcaatggcggcggatcggctgtgctgctggacacgagttccgactggggcagcagcggcgctgccatggccaccgagacatgcttcctgcaggactacatgggcgtgacggacacgggcagctcgtcgcagtggccacgcttctcgtcgtcggacacgataatggcggcggccgcggcgcgggcggcgacgacgcgggcgcccgagacgctccctctcttcccgacctgcggcgacgacggcggcagcggtagcagcagctacttgccgttctggggtgccgcgtccacaactgccggcgccacttcttccgttgcgatccagcagcaacaccagctgcaggagcagtacagcttttacagcaacagcaacagcacccagctggccggcaccggcaaccaagacgtatcggcaacagcagcagcagccgccgccctggagctgagcctcagctcatggtgctccccttaccctgctgcagggagtatgtgagagcaacgcgagctgccactgctcttcactggtaccgttaacagatcattcgacaaagcagcattagtccgttgatcggtggaagaccactcgtcagtgttgagttgaatgtttgatcaataaaatacggcaatgctgtaagggttgttttttatgccattgataatacactgtactgttcagttgttgaactctatttcttagccatgccaagtgcttttcttattttgaataacattacagcaaaaagttgaaagacaaaaaaaaaaacccccgaacagagtgctttgggtcccaagcttctttagactgtgttcggcgttccccctaaatttctccccctatatctcactcacttgtcacatcagcgttctctttccccctatatctccacgctctacagcagttccacctatatcaaacctctataccccaccacaacaatattatatactttcatcttcaactaactcatgtaccttccaatttttttctactaataattatttacgtgcacagaaacttagcaaggagagagagagcggggtgacccaccttgctagttggatattacctcttctcttcaaagtatccttgaacgctcaccggttatcaaatctctacactatagctctgtagtcttgctagatagttagttctttagctctcggtgaccaagcttggcgcgatcaagcttatcgataccgtcgacctcgaagcttggtcacccggtccgggcctagaaggccagcttcaagtttgtacaaaaaagcaggctccggccagaatggcccggaccgggttaccgaattcttaccctagctccctgcggctgttacgcggtcccccatcaatcttctgttcttgcggttgtagcctgtgtaacagtgctagagtatgtatgataaataggttttaagtctgcttacatgacattttttattgtggaagagacatataaaaattagagagagtggttctcatgcaacggcggacggcccggtgctaaaagagcttcaagacaaaataatgaaacaggaagagagtagatttatctaagagccaactttattatatgaatgtgtttattgttggctttagatgatatggtaaggagttagagctaataatagataggctctattattattattattaattaaactcgctctaaggaggaaagtgggaggaagggacgaggacgaagactactggaagcatcgtgcatggatgatggatgtggtgtctcttaatgtaggtggccggaggatgtacgtgttaattgcgcgataagcactcagatccaaccgcaaactacctccacactgacacactgatagagagaaagagagacctccgacgactgccgccgcagatgagccacgtacgtatacgacgtctgccggccggctcaggctgccgccatcaccctgctcgaaagtcgcgttaggcggcgccagctacataggagtatctagtctagccagttagtatactactactgcgctgatgatgaattaactctgcatagatactgtacttgcctccctccaacacccaaccacctcctgctcggctcttaataacttggacacggatcgatgccatccaaggaagaacacgacgacgacgacggaacatccaccatgcaagcttgcatccatacgccgatacgcgtgcatccatccatccaccattatttccattttccaccgatcacacgtacacaggcctatttaaggagcgacatcccactgcaactctcctcaccactcatcaccagctagctctagcaaagcacttgccatctaccgaccgccgcattccaaacagcccgacgagctagcagagcggcaggcacctccctcctcaaggaacccatggccactgtgaacaactggctcgctttctccctctccccgcaggagctgccgccctcccagacgacggactccacactcatctcggccgccaccgccgaccatgtctccggcgatgtctgcttcaacatcccccaagattggagcatgaggggatcagagctttcggcgctcgtcgcggagccgaagctggaggacttcctcggcggcatctccttctccgagcagcatcacaaggccaactgcaacatgatacccagcactagcagcacagtttgctacgcgagctcaggtgctagcaccggctaccatcaccagctgtaccaccagcccaccagctcagcgctccacttcgcggactccgtaatggtggcttcctcggccggtgtccacgacggcggtgccatgctcagcgcggccgccgctaacggtgtcgctggcgctgccagtgccaacggcggcggcatcgggctgtccatgattaagaactggctgcggagccaaccggcgcccatgcagccgagggtggcggcggctgagggcgcgcaggggctctctttgtccatgaacatggcggggacgacccaaggcgctgctggcatgccacttctcgctggagagcgcgcacgggcgcccgagagtgtatcgacgtcagcacagggtggagccgtcgtcgtcacggcgccgaaggaggatagcggtggcagcggtgttgccggcgctctagtagccgtgagcacggacacgggtggcagcggcggcgcgtcggctgacaacacggcaaggaagacggtggacacgttcgggcagcgcacgtcgatttaccgtggcgtgacaaggcatagatggactgggagatatgaggcacatctttgggataacagttgcagaagggaagggcaaactcgtaagggtcgtcaagtctatttaggtggctatgataaagaggagaaagctgctagggcttatgatcttgctgctctgaagtactggggtgccacaacaacaacaaattttccagtgagtaactacgaaaaggagctcgaggacatgaagcacatgacaaggcaggagtttgtagcgtctctgagaaggaagagcagtggtttctccagaggtgcatccatttacaggggagtgactaggcatcaccaacatggaagatggcaagcacggattggacgagttgcagggaacaaggatctttacttgggcaccttcagcacccaggaggaggcagcggaggcgtacgacatcgcggcgatcaagttccgcggcctcaacgccgtcaccaacttcgacatgagccgctacgacgtgaagagcatcctggacagcagcgccctccccatcggcagcgccgccaagcgcctcaaggaggccgaggccgcagcgtccgcgcagcaccaccacgccggcgtggtgagctacgacgtcggccgcatcgcctcgcagctcggcgacggcggagccctggcggcggcgtacggcgcgcactaccacggcgccgcctggccgaccatcgcgttccagccgggcgccgccagcacaggcctgtaccacccgtacgcgcagcagccaatgcgcggcggcgggtggtgcaagcaggagcaggaccacgcggtgatcgcggccgcgcacagcctgcaggacctccaccacctgaacctgggcgcggccggcgcgcacgactttttctcggcagggcagcaggccgccgccgctgcgatgcacggcctgggtagcatcgacagtgcgtcgctcgagcacagcaccggctccaactccgtcgtctacaacggcggggtcggcgacagcaacggcgccagcgccgtcggcggcagtggcggtggctacatgatgccgatgagcgctgccggagcaaccactacatcggcaatggtgagccacgagcaggtgcatgcacgggcctacgacgaagccaagcaggctgctcagatggggtacgagagctacctggtgaacgcggagaacaatggtggcggaaggatgtctgcatgggggactgtcgtgtctgcagccgcggcggcagcagcaagcagcaacgacaacatggccgccgacgtcgggcatggcggcgcgcagctcttcagtgtctggaacgacacttaagcgtacctagtggtacctgacatcttatagtctgcaacctctcgtgtctgaattcctatctttatcaagtgttattgcttccacgactataggacagctttcgtcgaaagcttttgctcatgtgatctcgaaggattcatctagtctgatttttcgtgacttgtatcggttttattggattcatccaacatatatcaataaaaaatgagttgtgtttcctttcttcctagttcagttaaaattatttccctcctgcgcttgtgctgtaattgtctgtgtacctgttgtttgtgactgtgttagttcccttggatatgatttcgtatttgatatgtacatggagatagcttagcttcattattggagtatgaagttagtatgacatagtcactctcctggaaaattgacactgcaaaccatatttttattctgaaccacaaatcctagtcagtccgctggcatatgccgtccgtttgctgaatccagaacgtgggtttggagatgtacggctgagatgcctctatgcgaaggggatttcgtggtgaaacgagatgggagtagagcaacgcccgtggaagatgcttcaaacttccacacttttgagcaacgatcggcagtagtaaggtagacgatttcaagatcaaagcatatgaagataaacaacatcaacaacaaaatttgttggggttctatagagagaaacagagctacatacatacactgttttgtatctaccatctgagatgatgaaaagatgaaaaactaaagaatgccccggcgccaacgccaggacacgccgcgcgcgcgtcacccgagccatctcttgacccagccggcgctgtatatttacacacgttgcagcatcgatcaccacctgttcgatcgcgtcgccgtcaccgggatctgagtcgaaacctagacttgtccatcttctggattggccaacttaattaatgtatgaaataaaaggatgcacacatagtgacatgctaatcactataatgtgggcatcaaagttgtgtgttatgtgtaattactagttatctgaataaaagagaaagagatcatccatatttcttatcctaaatgaatgtcacgtgtctttataattctttgatgaaccagatgcatttcattaaccaaatccatatacatataaatattaatcatatataattaatatcaattgggttagcaaaacaaatctagtctaggtgtgttttgcgaatgcgaccttcttatgtgcttctagtctccaaatgtggttgatagttattttgctctaagatcaacagtaatgaagtataaatcatcgttgtggtgtgctactcggttaattgagcattaacacacacaaacatgacgaggatggtataatctccaaaaatgtgtactttgttaggtgggaccctatagccttgattaatgtgctatgttaggcatgcctggaaacgtgtgacgcatatgttttgtgaacctgttgatattatatgtgcttttatattaccatattttattaaaatactaatatttattactagtaagatataacattctatctagcttaaaaactaaccataaatattccataataactagatttaccaaactaatatactaaatatacataataaatacaaaattaacaagacaataatcaatatttatgagcttaatatatttagacattatggttggtcgacgataatcatgctaacttttcgtaattgcttgattgaaatatgcttagaataatgcctctttgttctacatggcaaatagggaccattatggtgtaacaccctgggaaccacaaacaccccgaaatgctactaaactacacaactaaccttcatatataaaatttcgacagcatctcctttgaaaatttgcatagacgtggaagcaacagagtataaacagatatcatgataagaaaacatactagacattaataatctgctagaaatgggaagaatcctaacttgacgactgcgtaactgactagagtcacacttagctgaccctagtcacttacaactgacttcgtgtcctagatcgatgggccctggccgaagcttggtcacccggtccgggcctagaaggccagcttcaagtttgtaccctggagcttgccgagtgccatccttggacactcgataaagtatattttattttttttattttgccaaccaaactttttgtggtatgttcctacactatgtagatctacatgtaccattttggcacaattacatatttacaaaaatgttttctataaatattagatttagttcgtttatttgaatttcttcggaaaattcacatttaaactgcaagtcactcgaaacatggaaaaccgtgcatgcaaaataaatgatatgcatgttatctagcacaagttacgaccgatttcagaagcagaccagaatcttcaagcaccatgctcactaaacatgaccgtgaacttgttatctagttgtttaaaaattgtataaaacacaaataaagtcagaaattaatgaaacttgtccacatgtcatgatatcatatatagaggttgtgataaaaatttgataatgtttcggtaaagttgtgacgtactatgtgtagaaacctaagtgacctacacataaaatcatagagtttcaatgtagttcactcgacaaagactttgtcaagtgtccgataaaaagtactcgacaaagaagccgttgtcgatgtactgttcgtcgagatctctttgtcgagtgtcacactaggcaaagtctttacggagtgtttttcaggctttgacactcggcaaagcgctcgattccagtagtgacagtaatttgcatcaaaaatagctgagagatttaggccccgtttcaatctcacgggataaagtttagcttcctgctaaactttagctatatgaattgaagtgctaaagtttagtttcaattaccaccattagctctcctgtttagattacaaatggctaaaagtagctaaaaaatagctgctaaagtttatctcgcgagattgaaacagggccttaaaatgagtcaactaatagaccaactaattattagctattagtcgttagcttctttaatctaagctaaaaccaactaatagcttatttgttgaattacaattagctcaacggaattctctgtttttctaaaaaaaaactgcccctctcttacagcaaattgtccgctgcccgtcgtccagatacaatgaacgtacctagtaggaactcttttacacgctcggtcgctcgccgcggatcggagtccccggaacacgacaccactgtggaacacgacaaagtctgctcagaggcggccacaccctggcgtgcaccgagccggagcccggataagcacggtaaggagagtacggcgggacgtggcgacccgtgtgtctgctgccacgcagccttcctccacgtagccgcgcggccgcgccacgtaccagggcccggcgctggtataaatgcgcgccacctccgctttagttctgcatacagccaacccaaggatgtccaacctgctcacggttcaccagaaccttccggctcttccagtggacgcgacgtccgatgaagtcaggaagaacctcatggacatgttccgcgacaggcaagcgttcagcgagcacacctggaagatgctgctctccgtctgccgctcctgggctgcatggtgcaagctgaacaacaggaagtggttccccgctgagcccgaggacgtgagggattaccttctgtacctgcaagcgcgaggtttgtttctgcttctacctttgatatatatataataattatcattaattagtagtaatataatatttcaaatatttttttcaaaataaaagaatgtagtatatagcaattgcttttctgtagtttataagtgtgtatattttaatttataacttttctaatatatgaccaaaacatggtgatgcctaggtctggcagtgaagaccatccagcaacaccttggacaactgaacatgcttcacaggcgctccggcctcccgcgccccagcgactcgaacgccgtgagcctcgtcatgcgccgcatcaggaaggaaaacgtcgatgccggcgaaagggcaaagcaggccctcgcgttcgagaggaccgatttcgaccaggtccgcagcctgatggagaacagcgacaggtgccaggacattaggaacctggcgttcctcggaattgcatacaacacgctcctcaggatcgcggaaattgcccgcattcgcgtgaaggacattagccgcaccgacggcggcaggatgcttatccacattggcaggaccaagacgctcgtttccaccgcaggcgtcgaaaaggccctcagcctcggagtgaccaagctcgtcgaacgctggatctccgtgtccggcgtcgcggacgacccaaacaactacctcttctgccgcgtccgcaagaacggggtggctgcccctagcgccaccagccaactcagcacgagggccttggaaggtattttcgaggccacccaccgcctgatctacggcgcgaaggatgacagcggtcaacgctacctcgcatggtccgggcactccgcccgcgttggagctgctagggacatggcccgcgccggtgtttccatccccgaaatcatgcaggcgggtggatggacgaacgtgaacattgtcatgaactacattcgcaaccttgacagcgagacgggcgcaatggttcgcctcctggaagatggtgactgagctagacccagctttcttgtacaaagtggccgttaacggatccagacttgtccatcttctggattggccaacttaattaatgtatgaaataaaaggatgcacacatagtgacatgctaatcactataatgtgggcatcaaagttgtgtgttatgtgtaattactagttatctgaataaaagagaaagagatcatccatatttcttatcctaaatgaatgtcacgtgtctttataattctttgatgaaccagatgcatttcattaaccaaatccatatacatataaatattaatcatatataattaatatcaattgggttagcaaaacaaatctagtctaggtgtgttttgcgaattgcggcaagctgttaccgaattcctgcccttaaggccaattgttcaagattcattcaacaattgaaacatctcccatgattaaatcagtataaggttgctatggtcttgcttgacaaagtttttttttgagggaatttcaactaaatttttgagtgaaactatcaaatactgattttaaaaaatttttataaaaggaagcgcagagataaaaggccatctatgctacaaaagtacccaaaaatgtaatcctaaagtatgaattgcattttttttttgtttggacgaaaggaaaggagtattaccacaagaatgatatcatcttcatatttagatcttttttgggtaaagcttgagattctctaaatatagagaaatcagaagaaaaaaaaaccgtgttttggtggttttgatttctagcctccacaataactttgacggcgtcgacaagtctaacggacaccaagcagcgaaccaccagcgccgagccaagcgaagcagacggccgagacgttgacaccttcggcgcggcatctctcgagagttccgctccggcgctccacctccaccgctggcggtttcttattccgttccgttccgcctcctgctctgctcctctccacaccacacggcacgaaaccgttacggcaccggcagcacccagcacgggagaggggattcctttcccaccgttccttccctttccgccccgccgctataaatagccagccccatccccagcttttttccccaatctcatctcctctctcctgttgttcggagcacacgcacaatccgatcgatccccaaatccccttcgtctctcctcgcgagcctcgtggatcccagcttcaaggtacggcgatcgatcatcccccctccttctctctaccttcttttctctagactacatcggatggcgatccatggttagggcctgctagtttcccttcctgttttgtcgatggctgcgaggcacaatagatctgatggcgttatgacggctaacttgtcatgttgttgcgatttatagtccctttaggagatcagtttaatttctcggatggttcgagatcggtggtccatggttagtaccctaagatccgcgctgttagggttcgtagatggaggcgacctgttctgattgttaacttgtcagtacctgggaaatcctgggatggttctagctcgtccgcagatgagatcgatttcatgatcctctgtatcttgtttcgttgcctaggttccgtctaatctatccgtggtatgatgtagatgttttgatcgtgctaactacgtcttgtaaagttaattgtcaggtcataatttttagcatgcctttttttttgtttggttttgtctaattgggctgtcgttctagatcagagtagaagactgttccaaactacctgctggatttattgaacttggatctgtatgtgtgtcacatatcttcataaattcatgattaagatggattgaaatatcttttatctttttggtatggatagttctatatgttggtgtggctttgttagatgtatacatgcttagatacatgaagcaacgtgctgctactgtttagtaattgctgttcatttgtctaataaacagataaggatatgtatttatgttgctgttggttttgctggtactttgttggatacaaatgcttcaatacagaaaacagcatgctgctacgatttaccatttatctaatcttatcatatgtctaatctaataaacaaacatgcttttaaattatcttcatatgcttggatgatggcatacacagcggctatgtgtggttttttaaatacccagcatcatgggcatgcatgacactgctttaatatgctttttatttgcttgagactgtttcttttgtttatactgaccctttagttcggtgactcttctgcaggtcgactttaacttagcctaggatccatggcccagtccaagcacggcctgaccaaggagatgaccatgaagtaccgcatggagggctgcgtggacggccacaagttcgtgatcaccggcgagggcatcggctaccccttcaagggcaagcaggccatcaacctgtgcgtggtggagggcggccccttgcccttcgccgaggacatcttgtccgccgccttcatgtacggcaaccgcgtgttcaccgagtacccccaggacatcgtcgactacttcaagaactcctgccccgccggctacacctgggaccgctccttcctgttcgaggacggcgccgtgtgcatctgcaacgccgacatcaccgtgagcgtggaggagaactgcatgtaccacgagtccaagttctacggcgtgaacttccccgccgacggccccgtgatgaagaagatgaccgacaactgggagccctcctgcgagaagatcatccccgtgcccaagcagggcatcttgaagggcgacgtgagcatgtacctgctgctgaaggacggtggccgcttgcgctgccagttcgacaccgtgtacaaggccaagtccgtgccccgcaagatgcccgactggcacttcatccagcacaagctgacccgcgaggaccgcagcgacgccaagaaccagaagtggcacctgaccgagcacgccatcgcctccggctccgccttgccctccggactcagatctcgatagggtaccaatggccagttaacagatccagctgctgctgttctagggttcacaagtctgcctatttgtcttccccaatggagctatggttgtctggtctggtccttggtcgtgtcccgtttcattgtgtactatttacctgtaatgtgtatccttaagtctggtttgatggtgtctgaaacgttttgctgtggtagagcagcatggaagaactataatgaataagtgatccctaatcattgtgtccaaattttgcttctgctatacccttttgtgctgtttcttatgttttgcttaaaaatttgatctgacaaacaaatttgtctaaattatgctcttgttctgactgtgtactgtacacatttgtattgctaccggtttggcacatagttttctctttgattgcagatcaaacccttctgattgcagattgcttggctatggctgatgtgctcactgttcttctttagcttgtatattgctgatggtggcttggctacggctgaaaaagttgctgctgcgccgacttggcaactgttgctccagtaatgctttgtcctctcttcctagccgccgacttggcacttggcagctgttgctcctgtaatgcgttgttatctcttatctcttgagatgtactatgattttgaggctgtttgacttgtgccagattgccagtgctgatgctatattatctcaggtttttatgctagtatatgttttactgtgtgctgcctgtgtcgagttacgtaatctattgaaccgctatgcgtgttgatgccctgttgttgcttgccagattgatgcccctgttgcttgcagcttgcaagctgtagtgaaatcctaaaattcgaaaccaaatctattctgaacttttgaagatctgtgatgtccggaagaaaagattcaaacagataaacgggactctccagaatctataaaataaatgatcgacaaacgctttgctttggtaggcttcctagttagttagcggaccgaagcttcggtccgggcctagaaggccagcttcggccgccccatttcaaatatttttttcaaaataaaagaatgtagtatatagcaattgcttttctgtagtttataacttcgtatagcatacattatacgaagttatacttttctaatatatgaccaaaatttgttgatgtgcaggtcttcgcctaccccggcggcgcgtccatggagatccaccaggcactcacccgctcccccgtcatcgccaaccacctcttccgccacgagcaaggggaggcctttgccgcctccggctacgcgcgctcctcgggccgcgtcggcgtctgcatcgccacctccggccccggcgccaccaacctagtctccgcgctcgccgacgcgctgctcgattccgtccccatggtcgccatcacgggacaggtggcgcgacgcatgattggcaccgacgccttccaggagacgcccatcgtcgaggtcacccgctccatcaccaagcacaactacctggtcctcgacgtcgacgacatcccccgcgtcgtgcaggaggctttcttcctcgcctcctctggtcgaccagggccggtgcttgtcgacatccccaaggacatccagcagcagatggcggtgcctgtctgggacaagcccatgagtctgcctgggtacattgcgcgccttcccaagccccctgcgactgagttgcttgagcaggtgctgcgtcttgttggtgaatcgcggcgccctgttctttatgtgggcggtggctgcgcagcatctggtgaggagttgcgacgctttgtggagctgactggaatcccggtcacaactactcttatgggcctcggcaacttccccagcgacgacccactgtctctgcgcatgctaggtatgcatgggacggtgtatgcaaattatgcagtggataaggccgatctgttgcttgcacttggtgtgcggtttgatgatcgcgtgacagggaagattgaggcttttgcaagcagggctaagattgtgcacgttgatattgatccggctgagattggcaagaacaagcagccacatgtgtccatctgtgcagatgttaagcttgctttgcagggcatgaatgctcttcttgaaggaagcacatcaaagaagagctttgactttggctcatggaacgatgagttggatcagcagaagagggaattcccccttgggtataaaacatctaatgaggagatccagccacaatatgctattcaggttcttgatgagctgacgaaaggcgaggccatcatcggcacaggtgttgggcagcaccagatgtgggcggcacagtactacacttacaagcggccaaggcagtggttgtcttcagctggtcttggggctatgggatttggtttgccggctgctgctggtgcttctgtggcaaacccaggtgtcactgttgttgacatcgatggagatggtagctttctcatgaacgttcaggagctagctatgatccgaattgagaacctcccagtgaaggtctttgtgctaaacaaccagcacctggggatggtggtgcagttggaggacaggttctataaggccaacagagcgcacacatacttgggaaacccagagaatgaaagtgagatatatccagatttcgtgacgatcgccaaagggttcaacattccagcggtccgtgtgacaaagaagaacgaagtccgcgcagcgataaagaagatgctcgagactccagggccgtacctcttggatataatcgtcccacaccaggagcatgtgttgcctatgatccctagtggtggggctttcaaggatatgatcctggatggtgatggcaggactgtgtactgatgactagctagtcagttaacagatctgccagatcctcggtgtacaaataacccgtcttatcctatgagacgggccggcgtcagtgtgttctggaggaatttttatgtcagagcctttttctttgtgtgcttgatgtagatgccaagggaagcttattggctgttgaagcttgatgcaaaataaattatggaactctgttttttgtttatctaataataactagcaaatatgcttccattgcattgaaactaacagccttttgtgtttccaagttttattttgtgacaatgtcatctatttcaattagttgtggaatcggaaacttgcaggactaacttggaaactccaatccctcagcatcctggactttttcctggtgtaatccatgtagatattattttaatcatcattttagttctggaggtttttccatctccggttttgctcccctttcttcaaaaaaaaaaaaaaaatgccgtaggcgccgcaacgcccacctgttgttcaaactcatgggcacgagtggctcgaagattttatacaacaattgctgtagtttcaccgttgctggtgaagaagcatttttttaaaaaaatatagtggtattcattttaattagtttagttgtgcagcgagcaaaatttggacatgctctgctcggaatctgatcgacctagacacagattagcagcagtagctttgtcatctgttccaagagttgcgatctgatagaagaaaaaaaaaccttcccttcaatgtaaaaccgaaactaacaagaaagaagcacagtgccgtttaggcaagtatggagtacgtattaagcatgtagaaggccatgcatgaaccactaacaagaaagaagcgcagtgccattcaggcaagcataagcatgtagattggcatgcatgaacaactaacagtagatcgtctctggtctgattagaagttttttgggaagccaagaaatcatgtacaactggttccatctcaaattccgtggcaaaaagaggcctaagcaacataaagctttccactggttgccatatatgatttgggcatttcactttgatcttaatgggccttgtaaagcccaagactcatgattatctttagttgatgctcttaattaggtgtgggcaaataattcaaactgtatgtacccgaccaaaaccaaagcaaaaataatcgaaccaaaccgaaaatttaaaaataaccgaatgaaaactaaatcctataactgaaagaactgaaaccgaatcaaaatatttaatgtaaccaaaaatatccgaaatataattatattgtcaaaaatattaataatttctagattaaataattaaaaatacttaaaaatttatataaaatagtaaaaatactcgaaaataaccacaaatattcaaaaacaaccgaaatatcccaaaatattcaaagcaaaataaccgaatggataccaaattttaaaaccgaaaaaactggaacaaaaccaaaatcgaaccaaaatttcaaaaatcgaataaatactaaactttagaacaaaaaaaaacgataaccgaatgtatacgaaccaaagccgaattagataaccgaacgtccaggactactcttaatctttccgccacttatgatttgggctattactttgtttataatgagccttttcaagctcaagttcatgattgtccgtgagatgagaaactgacttgttggattcgaaaccctagctagtattggttaatacttaatacataaatgacctgcattgacatcatcatccaagaaaataaaaattgtatgcttgagatatttagttttcctagctaggttttctttattttagtaccgaatctttaggtgtgccacgttaatttagacccattttttcatacttaccaactgagtctagtttaatcatgactataatcgtataaaatgattcagtcgacgtcattgcgaacgtatataaaatcatccaaattgacgtcattccaaagaggtaagcatgcttatctaagagtccgagcatactaaacaagacgacattttatttgcactccaaatcaaattttgtattgcctaaagaaaaacaatcaaactcaagtttcttaaaattaatttcattcaaactaatcactttcaatatctcacatattattcatgccatttctatttgtctaaacatgatttaaaaaaaaaagtaaaatacaaagattactatgcaaaaactctataaaaaaaaattcaaatttcttatttatttgtgacatcaaattttcaaaataatttttttaattatcggttgatccggtcagtcgataaaaacataaactttcagcgaccgttaaaactttcctactaccgatttagagaaaatcttagcttgaaacgtaattgtaacctgccttcatgcaagtcgcaagatatgtcatcctaagttgtatatgttttctcaaaagatgtatttacttgagaaaatacgtttcaacgttgatggacaaccaattaagaatcaagcacctttcgtaatcaatttaggcttatcgtctaaggtatactgatttacgacagttgactagacttataaggaacaaaataatagaatagtttctaaacacttcacctaatcatagagactaagatggtaattcgtaaacgacaaagcctagtgacactgtccattgtaaaattccacatcatattagtattaaacatatacatgtagtttcctgaacacatgtagtatcaaacacacttcgtggcttcttcctcgaaacctgcggccgctcattaattaagtcatctagttgaaggatcgctatcaactttgtatagaaaagttgggccgaattcgagctcggtacggccagaatggcccggaccgaagcttatcttgcaagagcatccggccggatattgctttgcaaagatttgctagctagcagcacatgagatcgagttatgatctccaggtgtactcatgctctccttatgtttggatatactgatcttggatatctatagaagatccccaggtacaagatcaatgacatacttctgcacacttcgtgggattgtacagaatgatatactacatactgaaggtatgtggtggtcatgattttatatcattgaccttattatctataaagataatattacttggtgttgtttagatgaaaaacaagttacaaactaagtctctaccttacttcacattttaaatgtgtttgagagcaggtatgggatgacttagtaatttgcaaagatcagggggagtttcctcttgatcgaaagaacttgtttatacatcatggtgtactcttttctttgcatgagttttcccctgtttgggtttctcattcaaagtttttaacgaggcaacatcaacataaggcctatgtcgtatcatctatttttcccgtagaggttttcgaggatgatacattatggcatagttattgttgtatttgaactaggtgataagtttatctccctagagttcaaatgaatcaacaatagagtatgactactctccttatttctcccactgggtttttaaggagactcagctaatatgttgatttctcagattttctggcaagattatcttggagaaatattagcctgagttatatgtctcatcatttattttccccactggggtttttgagatgatgactatagacatgttattgttctttggtctagaggtccattggagaacaatatcgtaccatggttcaattgaaccaccgacaattatctataaggataattgagcttgtgttgttcagatggaaacaggttatatgaggagcaacatattgctcctaaattgttttatccccatgaacttcaggaaaatgaagatataaacatcttgcaaacaaagtcttgtgataatcttgctgatctattcacaaaatctctaccatactcaacgttttcagaaatgtgttgaggtgattggtatgagaagactcaagtgtttgcaagatcagggggagtaattctccgtgatatttgacctgttttataccatcatattacactcttttctttgtatgagttttgccttgttaaggttttctcatccaaagtttttaacgaggtaatatcaactaagctatatgcttcatcattcactttttcccacaggggtttttatgcatgatgattacaagcatattcttttggagttcaatatgagttttactcataatccaaaagacattgtgtactccttatttttcccacagggtttttgaggagatgatatattggaagacaacttgcagatgatctagtggacttggattgatcaagggggagtgttacaaaatattgtcatgtgatcaaccctctcccctgacagttttctttcaagggacacaccccttgggagacactgtatccacatgtatataaaccagattatctgcaataaagatctacaactgtcatttgtctctctctcaatctcgttactactgagtatactataacaggttcgaccaaaaatagcaaatggtggtctggcttctcgtcatgcatggttttacacgtgtacaggcgagaaagctcatcttaacaaatttaataacccaaatatatatgcatagaaatacccgaccatttgtttgttgagctagcgtgtggctcgcctttggcctcgcctgacctcaccttatatttctaataataccacgtctccctccttatatttaccctcttctcccaagagaaaaatcgggctccaatgcaaacaccagttttctaccctaaacacaagaacccagatgcataataaaaggtgaaagctagcagaagaggtacctaactctaccctactatagagaaaaagtcagcacattgcaagcaataataggatccatggaccaccacctcacgccgacgccgccgccgccgccgccgccgatggggaactccgcggcgggggcgtcctcgaagccgccgacgccggcgtccacgcccaactcgcgcctcgcctcggcgccgtcctcccgccacgccgccacgccgccgcacgcgtcggcggcggcgtccgccccggcgccggcctcgcgcaccgtctacagcgaccgcttcatccccagccgcaccggatccaacctcgcgctcttcgacctcgccccctcgccctcctccgccgcctcgtcctcgcactcgcacgacgccggccccgcggcctcgtccggatctgcgcagcccgccgcgtcgccctactgcacgctcctccgcgccgcgctcttcggccccgacacgcccgaccgcgtcgcgtcctcggccgccgcgtgctcctcgtcgtcgtcctccttctccccggggccctcgcctgtcggcacccccgccaccgggaacatcttcagattcaagacggaggtgcgccggaacgccaagagggcgcttttttcgggagaccaagaggaggacgcgctgttccccggcattttcaccaccaggggcgcgggaccaaggaaggtgccaaggtcgccgtacaaggtgctggatgcgcccgctttgcaggacgacttctacctcaacctcgtcgattggtcttcacataacgtccttgctgtcgggttgggcaattgcgtttacttgtggaatgcatgcagcagcaaggtcaccaagctttgtgatttgggggtggatgacaatgtttgctctgtggggtgggcgcagcgcggcactcacctagctgtaggcacaaagcaaggaaaagttcagatctgggatgcaactcgttgtaaaagaataagaactatggaaagccatcgcatgcgtgtaggtgctcttgcatggagttcttctttgctttcttctggaagccgtgacaagagcatcctccaccatgatatccgtgctcaagaagattatgttagcaagcttaccgggcataaatctgaggtttgtggactcaagtggtcttatgacaatcgtcagcttgcatccggaggcaatgacaatggactttttgtttggaatccacattcagtacaaccagtactgaagtatactgagcacacagcagctgtcaaagctattgcctggtcacctcatctccacggcctgcttgcatctggtggaggaactgcagatagatgcatacgattctggaatacgaccacaaatacacacttgagttgtgtggacactggcagccaggtctgcaatcttgcgtggtcaaagaatgtgaatgagcttgttagcacccacgggtactcccagaaccagataattgtttggagatatccaacaatgtcgaagcttgccactttgacagggcacacgtaccgagtattgtatttagctatttcccctgacggccagaccatagttactggtgccggtgacgaaacactccgtttttggaacgtgttcccctctccaaagtcccagagctctgatagtctaagttgcatcgggggtacatcgtttgttagaagctacatccggatttaaatgcccgggcgatcgctcgaggcgtacctagtggtaccacatggttaacctagacttgtccatcttctggattggccaacttaattaatgtatgaaataaaaggatgcacacatagtgacatgctaatcactataatgtgggcatcaaagttgtgtgttatgtgtaattactagttatctgaataaaagagaaagagatcatccatatttcttatcctaaatgaatgtcacgtgtctttataattctttgatgaaccagatgcatttcattaaccaaatccatatacatataaatattaatcatatataattaatatcaattgggttagcaaaacaaatctagtctaggtgtgttttgcgaatgcggccgccaccgcggtggagctcgaattccggtccgggcctagaaggccagcttcaagtttgtacaaaaaagcaggctccggccagaatggcccggaccgggttaccgaattcgagctcggtaccctgggatccgatatcgatgggccctggccgaagcttggtcacccggtccgggcctagaaggccgatctcccgggcacccagctttcttgtacaaagtggccgttaacggatcggccagaatggcccggaccgaagcttgcatgcctgcagtgcagcgtgacccggtcgtgcccctctctagagataatgagcattgcatgtctaagttataaaaaattaccacatattttttttgtcacacttgtttgaagtgcagtttatctatctttatacatatatttaaactttactctacgaataatataatctatagtactacaataatatcagtgttttagagaatcatataaatgaacagttagacatggtctaaaggacaattgagtattttgacaacaggactctacagttttatctttttagtgtgcatgtgttctcctttttttttgcaaatagcttcacctatataatacttcatccattttattagtacatccatttagggtttagggttaatggtttttatagactaatttttttagtacatctattttattctattttagcctctaaattaagaaaactaaaactctattttagtttttttatttaataatttagatataaaatagaataaaataaagtgactaaaaattaaacaaataccctttaagaaattaaaaaaactaaggaaacatttttcttgtttcgagtagataatgccagcctgttaaacgccgtcgacgagtctaacggacaccaaccagcgaaccagcagcgtcgcgtcgggccaagcgaagcagacggcacggcatctctgtcgctgcctctggacccctctcgagagttccgctccaccgttggacttgctccgctgtcggcatccagaaattgcgtggcggagcggcagacgtgagccggcacggcaggcggcctcctcctcctctcacggcaccggcagctacgggggattcctttcccaccgctccttcgctttcccttcctcgcccgccgtaataaatagacaccccctccacaccctctttccccaacctcgtgttgttcggagcgcacacacacacaaccagatctcccccaaatccacccgtcggcacctccgcttcaaggtacgccgctcgtcctcccccccccccctctctaccttctctagatcggcgttccggtccatgcatggttagggcccggtagttctacttctgttcatgtttgtgttagatccgtgtttgtgttagatccgtgctgctagcgttcgtacacggatgcgacctgtacgtcagacacgttctgattgctaacttgccagtgtttctctttggggaatcctgggatggctctagccgttccgcagacgggatcgatttcatgattttttttgtttcgttgcatagggtttggtttgcccttttcctttatttcaatatatgccgtgcacttgtttgtcgggtcatcttttcatgcttttttttgtcttggttgtgatgatgtggtctggttgggcggtcgttctagatcggagtagaattctgtttcaaactacctggtggatttattaattttggatctgtatgtgtgtgccatacatattcatagttacgaattgaagatgatggatggaaatatcgatctaggataggtatacatgttgatgcgggttttactgatgcatatacagagatgctttttgttcgcttggttgtgatgatgtggtgtggttgggcggtcgttcattcgttctagatcggagtagaatactgtttcaaactacctggtgtatttattaattttggaactgtatgtgtgtgtcatacatcttcatagttacgagtttaagatggatggaaatatcgatctaggataggtatacatgttgatgtgggttttactgatgcatatacatgatggcatatgcagcatctattcatatgctctaaccttgagtacctatctattataataaacaagtatgttttataattattttgatcttgatatacttggatgatggcatatgcagcagctatatgtggatttttttagccctgccttcatacgctatttatttgcttggtactgtttcttttgtcgatgctcaccctgttgtttggtgttacttctgcaggtcgactttaacttagcctaggatccatggcctcctccgagaacgtcatcaccgagttcatgcgcttcaaggtgcgcatggagggcaccgtgaacggccacgagttcgagatcgagggcgagggcgagggccgcccctacgagggccacaacaccgtgaagctgaaggtgaccaagggcggccccctgcccttcgcctgggacatcctgtccccccagttccagtacggctccaaggtgtacgtgaagcaccccgccgacatccccgactacaagaagctgtccttccccgagggcttcaagtgggagcgcgtgatgaacttcgaggacggcggcgtggcgaccgtgacccaggactcctccctgcaggacggctgcttcatctacaaggtgaagttcatcggcgtgaacttcccctccgacggccccgtgatgcagaagaagaccatgggctgggaggcctccaccgagcgcctgtacccccgcgacggcgtgctgaagggcgagacccacaaggccctgaagctgaaggacggcggccactacctggtggagttcaagtccatctacatggccaagaagcccgtgcagctgcccggctactactacgtggacgccaagctggacatcacctcccacaacgaggactacaccatcgtggagcagtacgagcgcaccgagggccgccaccacctgttcctgtagggtaccacatggttaacctagacttgtccatcttctggattggccaacttaattaatgtatgaaataaaaggatgcacacatagtgacatgctaatcactataatgtgggcatcaaagttgtgtgttatgtgtaattactagttatctgaataaaagagaaagagatcatccatatttcttatcctaaatgaatgtcacgtgtctttataattctttgatgaaccagatgcatttcattaaccaaatccatatacatataaatattaatcatatataattaatatcaattgggttagcaaaacaaatctagtctaggtgtgttttgcgaatgcggccgccaccgcggtggagctcgaattccggtccgggcctagaaggccagcttcggccgccccgggcaactttattatacaaagttgatagatcctcatgtcttcatcgtaagcttaaacaggccagaatggcctctggattcagcggcctagaaggccgaagtacttggtcttcctagtcgagtagatcacattcaagcttggtcacccggtccgtcaatattctgattccgatgacttcgtaggttcctagctcaagccgctcgtgtccaagcgtcacttacgattagctaatgattacggcatctaggaccgactagtggcgcgccgactagctagctaaggtaccgagctcgaattcattccgattaatcgtggcctcttgctcttcaggatgaagagctatgtttaaacgtgcaagcgctactagacaattcagtacattaaaaacgtccgcaatgtgttattaagttgtctaagcgtcaatttgtttacaccacaatatatcctgcca

SEQ ID NO: 49 - DNA, 29133 bp, Artificial Sequence
  RX000018
gtttacccgccaatatatcctgtcaaacactgatagtttaaactgaaggcgggaaacgacaatctgatcatgagcggagaattaagggagtcacgttatgacccccgccgatgacgcgggacaagccgttttacgtttggaactgacagaaccgcaacgttgaaggagccactcagcaagctggtacgattgtaatacgactcactatagggcgaattgagcgctgtttaaacgctcttcaactggaagagcggttacgctgtttaaacgctcttcaactggaagagcggttactaccggttcactagctagctgctaatcgagctagttaccctatgaggtgacatgaagcgctcacggttactatgacggttagcttcacgactgttggtggcagtagcgtacgacttagctatagttccggacttacccttaagcgatttaaatctgcggttaccgaattcgagctcggtaccctgggatctgcccttactttaacgcctctaaccaacacccctttatctttataaggaacaataaacagaatttgccccactgttctaaatcacctaataatatccccagctaaaaacaataaaggtttcctagaattaagacaagcatgactgttcctccaggagggtttggaacattgttgcagtcttgcagatacgggcgaagggtgagaaacagagcggagggctggaggtgacctcggtagtcgacgccggagttgagcttgacaacgacggggcggcccctgatggacttgaggaagtccgatggcgtcttcaccgtcccgccggcgcccgaggcgggcctgtcgctgccgccgccgccgctgctcatcttgcgcgctgtgcccccggcggtgtccctgtgttgcggatcgcgggtgggccaggtggatgcgagggcgacccgtttggactccggccggagccgccggatccctggtcggtgtcagtgccgtttactctgggccccacgtgtcagtaccgtctgtagatgacaacaacccgtcgtccacagtcatgtccaaaatatcctttcttcttttttttcgattcggatatctatcttccttttttttttccaaaaatcttcttgacgcaccagcgcgcacgtttgtggtaaacgccgacacgtcggtcccacgtcgatagaccccacccaccagtgagtagcgtgtacgtattcgggggtgacggacgtgtcgccgtcgtcttgctagtcccattcccatctgagccacacatctctgaacaaaaaaaaggagggaggcctccacgcacatccccctccgtgccacccgccccaaaccctcgcgccgcctccgagacagccgccgcaaccatggccaccgccgccgccgcgtctaccgcgctcactggcgccactaccgctgcgcccaaggcgaggcgccgggcgcacctcctggccacccgccgcgccctcgccgcgcccatcaggtgctcagcggcgtcacccgccatgccgatggctcccccggccaccccgctccggccgtggggccccaccgagccccgcaagggtgctgacatcctcgtcgagtccctcgagcgctgcggcgtccgcgacgtaagtttctgcttctacctttgatatatatataataattatcattaattagtagtaatataatatttcaaatatttttttcaaaataaaagaatgtagtatatagcaattgcttttctgtagtttataacttcgtatagcatacattatacgaagttatacttttctaatatatgaccaaaatttgttaccgaattcaggcgacccatcgctgctttgtctacatcatgttcttcatcatcctccccaggcgacgcgtgctgctgttcttattcagactaccgttcgagtgactgcatggcgtacatctttctgcatcgactttgtacggctacatcgaacatatacacgagatgtctcgtgtgaatagagtcactaatgccttaagcatcggttactccgtagggtacattctgttcttcttatttgtgcatatttttattgttgtttactgattatacgagtagttatacatacatgcacatacatatcatcacatatatcacaatatttttctaaattaaattaaaactaaaaatgactaaatttctaacaccaacgacattgtaatgttttctccaacaactttacctattctacattgttctatttcgaatttcactctataaacaacatagtctacaatggaaaacagtgctttgtacgactatatacgcgatgtgtggctacaacataagacaatatagtcgtttgaagattgaacctatatatcggtacggttaatccgtctatgtacgtgggcatgacgaacacccgtgataacgaaggattaacgtgcacaatcataaatccaaagtaggagcggtgcatgatgagaatcgctctcagtactcgacataatgaaccttacgaggtacaacaggcaggcaggcagggaccaggggccgcctttatttcaggctcgctggccccacgggcgtgctgcgtgcacgaagggcactaccccaacctctcaccgaaaaccgcgctggatcggcaaatcaaacgaggtggtgccccgtgcccactctccacgtccacggcaccatccctctgcagccgctcaccagccatgccgtgtcgcggaacggcacaaccacccccaacccactcacgaaaccccgtcccggccgtgcccgtgtcggtccgcgctcggcaacgaggcggcccgcgctgctgagtcccctggacacccgacaccctgtcggccctttgtttattcatcccgaaatctcatctgcccccacggccgactgcgctgcgccgcccggatatatatacccatcgttatcgatcgactggggactctatcagtgatagagtctagaggatcgctcaggaaggccgctgagatagaggcatggcggccaatgcgggcggcggtggagcgggaggaggcagcggcagcggcagcgtggctgcgccggcggtgtgccgccccagcggctcgcggtggacgccgacgccggagcagatcaggatgctgaaggagctctactacggctgcggcatccggtcgcccagctcggagcagatccagcgcatcaccgccatgctgcggcagcacggcaagatcgagggcaagaacgtcttctactggttccagaaccacaaggcccgcgagcgccagaagcgccgcctcaccagcctcgacgtcaacgtgcccgccgccggcgcggccgacgccaccaccagccaactcggcgtcctctcgctgtcgtcgccgccgccttcaggcgcggcgcctccctcgcccaccctcggcttctacgccgccggcaatggcggcggatcggctgtgctgctggacacgagttccgactggggcagcagcggcgctgccatggccaccgagacatgcttcctgcaggactacatgggcgtgacggacacgggcagctcgtcgcagtggccacgcttctcgtcgtcggacacgataatggcggcggccgcggcgcgggcggcgacgacgcgggcgcccgagacgctccctctcttcccgacctgcggcgacgacggcggcagcggtagcagcagctacttgccgttctggggtgccgcgtccacaactgccggcgccacttcttccgttgcgatccagcagcaacaccagctgcaggagcagtacagcttttacagcaacagcaacagcacccagctggccggcaccggcaaccaagacgtatcggcaacagcagcagcagccgccgccctggagctgagcctcagctcatggtgctccccttaccctgctgcagggagtatgtgagagcaacgcgagctgccactgctcttcactggtaccgttaacagatcattcgacaaagcagcattagtccgttgatcggtggaagaccactcgtcagtgttgagttgaatgtttgatcaataaaatacggcaatgctgtaagggttgttttttatgccattgataatacactgtactgttcagttgttgaactctatttcttagccatgccaagtgcttttcttattttgaataacattacagcaaaaagttgaaagacaaaaaaaaaaacccccgaacagagtgctttgggtcccaagcttctttagactgtgttcggcgttccccctaaatttctccccctatatctcactcacttgtcacatcagcgttctctttccccctatatctccacgctctacagcagttccacctatatcaaacctctataccccaccacaacaatattatatactttcatcttcaactaactcatgtaccttccaatttttttctactaataattatttacgtgcacagaaacttagcaaggagagagagagcggggtgacccaccttgctagttggatattacctcttctcttcaaagtatccttgaacgctcaccggttatcaaatctctacactatagctctgtagtcttgctagatagttagttctttagctctcggtgaccaagcttggcgcgatcaagcttatcgataccgtcgacctcgaagcttggtcacccggtccgggcctagaaggccagcttcaagtttgtacaaaaaagcaggctccggccagaatggcccggaccgggttaccgaattcttaccctagctccctgcggctgttacgcggtcccccatcaatcttctgttcttgcggttgtagcctgtgtaacagtgctagagtatgtatgataaataggttttaagtctgcttacatgacattttttattgtggaagagacatataaaaattagagagagtggttctcatgcaacggcggacggcccggtgctaaaagagcttcaagacaaaataatgaaacaggaagagagtagatttatctaagagccaactttattatatgaatgtgtttattgttggctttagatgatatggtaaggagttagagctaataatagataggctctattattattattattaattaaactcgctctaaggaggaaagtgggaggaagggacgaggacgaagactactggaagcatcgtgcatggatgatggatgtggtgtctcttaatgtaggtggccggaggatgtacgtgttaattgcgcgataagcactcagatccaaccgcaaactacctccacactgacacactgatagagagaaagagagacctccgacgactgccgccgcagatgagccacgtacgtatacgacgtctgccggccggctcaggctgccgccatcaccctgctcgaaagtcgcgttaggcggcgccagctacataggagtatctagtctagccagttagtatactactactgcgctgatgatgaattaactctgcatagatactgtacttgcctccctccaacacccaaccacctcctgctcggctcttaataacttggacacggatcgatgccatccaaggaagaacacgacgacgacgacggaacatccaccatgcaagcttgcatccatacgccgatacgcgtgcatccatccatccaccattatttccattttccaccgatcacacgtacacaggcctatttaaggagcgacatcccactgcaactctcctcaccactcatcaccagctagctctagcaaagcacttgccatctaccgaccgccgcattccaaacagcccgacgagctagcagagcggcaggcacctccctcctcaaggaacccatggccactgtgaacaactggctcgctttctccctctccccgcaggagctgccgccctcccagacgacggactccacactcatctcggccgccaccgccgaccatgtctccggcgatgtctgcttcaacatcccccaagattggagcatgaggggatcagagctttcggcgctcgtcgcggagccgaagctggaggacttcctcggcggcatctccttctccgagcagcatcacaaggccaactgcaacatgatacccagcactagcagcacagtttgctacgcgagctcaggtgctagcaccggctaccatcaccagctgtaccaccagcccaccagctcagcgctccacttcgcggactccgtaatggtggcttcctcggccggtgtccacgacggcggtgccatgctcagcgcggccgccgctaacggtgtcgctggcgctgccagtgccaacggcggcggcatcgggctgtccatgattaagaactggctgcggagccaaccggcgcccatgcagccgagggtggcggcggctgagggcgcgcaggggctctctttgtccatgaacatggcggggacgacccaaggcgctgctggcatgccacttctcgctggagagcgcgcacgggcgcccgagagtgtatcgacgtcagcacagggtggagccgtcgtcgtcacggcgccgaaggaggatagcggtggcagcggtgttgccggcgctctagtagccgtgagcacggacacgggtggcagcggcggcgcgtcggctgacaacacggcaaggaagacggtggacacgttcgggcagcgcacgtcgatttaccgtggcgtgacaaggcatagatggactgggagatatgaggcacatctttgggataacagttgcagaagggaagggcaaactcgtaagggtcgtcaagtctatttaggtggctatgataaagaggagaaagctgctagggcttatgatcttgctgctctgaagtactggggtgccacaacaacaacaaattttccagtgagtaactacgaaaaggagctcgaggacatgaagcacatgacaaggcaggagtttgtagcgtctctgagaaggaagagcagtggtttctccagaggtgcatccatttacaggggagtgactaggcatcaccaacatggaagatggcaagcacggattggacgagttgcagggaacaaggatctttacttgggcaccttcagcacccaggaggaggcagcggaggcgtacgacatcgcggcgatcaagttccgcggcctcaacgccgtcaccaacttcgacatgagccgctacgacgtgaagagcatcctggacagcagcgccctccccatcggcagcgccgccaagcgcctcaaggaggccgaggccgcagcgtccgcgcagcaccaccacgccggcgtggtgagctacgacgtcggccgcatcgcctcgcagctcggcgacggcggagccctggcggcggcgtacggcgcgcactaccacggcgccgcctggccgaccatcgcgttccagccgggcgccgccagcacaggcctgtaccacccgtacgcgcagcagccaatgcgcggcggcgggtggtgcaagcaggagcaggaccacgcggtgatcgcggccgcgcacagcctgcaggacctccaccacctgaacctgggcgcggccggcgcgcacgactttttctcggcagggcagcaggccgccgccgctgcgatgcacggcctgggtagcatcgacagtgcgtcgctcgagcacagcaccggctccaactccgtcgtctacaacggcggggtcggcgacagcaacggcgccagcgccgtcggcggcagtggcggtggctacatgatgccgatgagcgctgccggagcaaccactacatcggcaatggtgagccacgagcaggtgcatgcacgggcctacgacgaagccaagcaggctgctcagatggggtacgagagctacctggtgaacgcggagaacaatggtggcggaaggatgtctgcatgggggactgtcgtgtctgcagccgcggcggcagcagcaagcagcaacgacaacatggccgccgacgtcgggcatggcggcgcgcagctcttcagtgtctggaacgacacttaagcgtacctagtggtacctgacatcttatagtctgcaacctctcgtgtctgaattcctatctttatcaagtgttattgcttccacgactataggacagctttcgtcgaaagcttttgctcatgtgatctcgaaggattcatctagtctgatttttcgtgacttgtatcggttttattggattcatccaacatatatcaataaaaaatgagttgtgtttcctttcttcctagttcagttaaaattatttccctcctgcgcttgtgctgtaattgtctgtgtacctgttgtttgtgactgtgttagttcccttggatatgatttcgtatttgatatgtacatggagatagcttagcttcattattggagtatgaagttagtatgacatagtcactctcctggaaaattgacactgcaaaccatatttttattctgaaccacaaatcctagtcagtccgctggcatatgccgtccgtttgctgaatccagaacgtgggtttggagatgtacggctgagatgcctctatgcgaaggggatttcgtggtgaaacgagatgggagtagagcaacgcccgtggaagatgcttcaaacttccacacttttgagcaacgatcggcagtagtaaggtagacgatttcaagatcaaagcatatgaagataaacaacatcaacaacaaaatttgttggggttctatagagagaaacagagctacatacatacactgttttgtatctaccatctgagatgatgaaaagatgaaaaactaaagaatgccccggcgccaacgccaggacacgccgcgcgcgcgtcacccgagccatctcttgacccagccggcgctgtatatttacacacgttgcagcatcgatcaccacctgttcgatcgcgtcgccgtcaccgggatctgagtcgaaacctagacttgtccatcttctggattggccaacttaattaatgtatgaaataaaaggatgcacacatagtgacatgctaatcactataatgtgggcatcaaagttgtgtgttatgtgtaattactagttatctgaataaaagagaaagagatcatccatatttcttatcctaaatgaatgtcacgtgtctttataattctttgatgaaccagatgcatttcattaaccaaatccatatacatataaatattaatcatatataattaatatcaattgggttagcaaaacaaatctagtctaggtgtgttttgcgaatgcgaccttcttatgtgcttctagtctccaaatgtggttgatagttattttgctctaagatcaacagtaatgaagtataaatcatcgttgtggtgtgctactcggttaattgagcattaacacacacaaacatgacgaggatggtataatctccaaaaatgtgtactttgttaggtgggaccctatagccttgattaatgtgctatgttaggcatgcctggaaacgtgtgacgcatatgttttgtgaacctgttgatattatatgtgcttttatattaccatattttattaaaatactaatatttattactagtaagatataacattctatctagcttaaaaactaaccataaatattccataataactagatttaccaaactaatatactaaatatacataataaatacaaaattaacaagacaataatcaatatttatgagcttaatatatttagacattatggttggtcgacgataatcatgctaacttttcgtaattgcttgattgaaatatgcttagaataatgcctctttgttctacatggcaaatagggaccattatggtgtaacaccctgggaaccacaaacaccccgaaatgctactaaactacacaactaaccttcatatataaaatttcgacagcatctcctttgaaaatttgcatagacgtggaagcaacagagtataaacagatatcatgataagaaaacatactagacattaataatctgctagaaatgggaagaatcctaacttgacgactgcgtaactgactagagtcacacttagctgaccctagtcacttacaactgacttcgtgtcctagatcgatgggccctggccgaagcttggtcacccggtccgggcctagaaggccagcttcaagtttgtaccctggagcttgccgagtgccatccttggacactcgataaagtatattttattttttttattttgccaaccaaactttttgtggtatgttcctacactatgtagatctacatgtaccattttggcacaattacatatttacaaaaatgttttctataaatattagatttagttcgtttatttgaatttcttcggaaaattcacatttaaactgcaagtcactcgaaacatggaaaaccgtgcatgcaaaataaatgatatgcatgttatctagcacaagttacgaccgatttcagaagcagaccagaatcttcaagcaccatgctcactaaacatgaccgtgaacttgttatctagttgtttaaaaattgtataaaacacaaataaagtcagaaattaatgaaacttgtccacatgtcatgatatcatatatagaggttgtgataaaaatttgataatgtttcggtaaagttgtgacgtactatgtgtagaaacctaagtgacctacacataaaatcatagagtttcaatgtagttcactcgacaaagactttgtcaagtgtccgataaaaagtactcgacaaagaagccgttgtcgatgtactgttcgtcgagatctctttgtcgagtgtcacactaggcaaagtctttacggagtgtttttcaggctttgacactcggcaaagcgctcgattccagtagtgacagtaatttgcatcaaaaatagctgagagatttaggccccgtttcaatctcacgggataaagtttagcttcctgctaaactttagctatatgaattgaagtgctaaagtttagtttcaattaccaccattagctctcctgtttagattacaaatggctaaaagtagctaaaaaatagctgctaaagtttatctcgcgagattgaaacagggccttaaaatgagtcaactaatagaccaactaattattagctattagtcgttagcttctttaatctaagctaaaaccaactaatagcttatttgttgaattacaattagctcaacggaattctctgtttttctaaaaaaaaactgcccctctcttacagcaaattgtccgctgcccgtcgtccagatacaatgaacgtacctagtaggaactcttttacacgctcggtcgctcgccgcggatcggagtccccggaacacgacaccactgtggaacacgacaaagtctgctcagaggcggccacaccctggcgtgcaccgagccggagcccggataagcacggtaaggagagtacggcgggacgtggcgacccgtgtgtctgctgccacgcagccttcctccacgtagccgcgcggccgcgccacgtaccagggcccggcgctggtataaatgcgcgccacctccgctttagttctgcatacagccaacccaaggatgtccaacctgctcacggttcaccagaaccttccggctcttccagtggacgcgacgtccgatgaagtcaggaagaacctcatggacatgttccgcgacaggcaagcgttcagcgagcacacctggaagatgctgctctccgtctgccgctcctgggctgcatggtgcaagctgaacaacaggaagtggttccccgctgagcccgaggacgtgagggattaccttctgtacctgcaagcgcgaggtttgtttctgcttctacctttgatatatatataataattatcattaattagtagtaatataatatttcaaatatttttttcaaaataaaagaatgtagtatatagcaattgcttttctgtagtttataagtgtgtatattttaatttataacttttctaatatatgaccaaaacatggtgatgcctaggtctggcagtgaagaccatccagcaacaccttggacaactgaacatgcttcacaggcgctccggcctcccgcgccccagcgactcgaacgccgtgagcctcgtcatgcgccgcatcaggaaggaaaacgtcgatgccggcgaaagggcaaagcaggccctcgcgttcgagaggaccgatttcgaccaggtccgcagcctgatggagaacagcgacaggtgccaggacattaggaacctggcgttcctcggaattgcatacaacacgctcctcaggatcgcggaaattgcccgcattcgcgtgaaggacattagccgcaccgacggcggcaggatgcttatccacattggcaggaccaagacgctcgtttccaccgcaggcgtcgaaaaggccctcagcctcggagtgaccaagctcgtcgaacgctggatctccgtgtccggcgtcgcggacgacccaaacaactacctcttctgccgcgtccgcaagaacggggtggctgcccctagcgccaccagccaactcagcacgagggccttggaaggtattttcgaggccacccaccgcctgatctacggcgcgaaggatgacagcggtcaacgctacctcgcatggtccgggcactccgcccgcgttggagctgctagggacatggcccgcgccggtgtttccatccccgaaatcatgcaggcgggtggatggacgaacgtgaacattgtcatgaactacattcgcaaccttgacagcgagacgggcgcaatggttcgcctcctggaagatggtgactgagctagacccagctttcttgtacaaagtggccgttaacggatccagacttgtccatcttctggattggccaacttaattaatgtatgaaataaaaggatgcacacatagtgacatgctaatcactataatgtgggcatcaaagttgtgtgttatgtgtaattactagttatctgaataaaagagaaagagatcatccatatttcttatcctaaatgaatgtcacgtgtctttataattctttgatgaaccagatgcatttcattaaccaaatccatatacatataaatattaatcatatataattaatatcaattgggttagcaaaacaaatctagtctaggtgtgttttgcgaattgcggcaagctgttaccgaattcctgcccttaaggccaattgttcaagattcattcaacaattgaaacatctcccatgattaaatcagtataaggttgctatggtcttgcttgacaaagtttttttttgagggaatttcaactaaatttttgagtgaaactatcaaatactgattttaaaaaatttttataaaaggaagcgcagagataaaaggccatctatgctacaaaagtacccaaaaatgtaatcctaaagtatgaattgcattttttttttgtttggacgaaaggaaaggagtattaccacaagaatgatatcatcttcatatttagatcttttttgggtaaagcttgagattctctaaatatagagaaatcagaagaaaaaaaaaccgtgttttggtggttttgatttctagcctccacaataactttgacggcgtcgacaagtctaacggacaccaagcagcgaaccaccagcgccgagccaagcgaagcagacggccgagacgttgacaccttcggcgcggcatctctcgagagttccgctccggcgctccacctccaccgctggcggtttcttattccgttccgttccgcctcctgctctgctcctctccacaccacacggcacgaaaccgttacggcaccggcagcacccagcacgggagaggggattcctttcccaccgttccttccctttccgccccgccgctataaatagccagccccatccccagcttttttccccaatctcatctcctctctcctgttgttcggagcacacgcacaatccgatcgatccccaaatccccttcgtctctcctcgcgagcctcgtggatcccagcttcaaggtacggcgatcgatcatcccccctccttctctctaccttcttttctctagactacatcggatggcgatccatggttagggcctgctagtttcccttcctgttttgtcgatggctgcgaggcacaatagatctgatggcgttatgacggctaacttgtcatgttgttgcgatttatagtccctttaggagatcagtttaatttctcggatggttcgagatcggtggtccatggttagtaccctaagatccgcgctgttagggttcgtagatggaggcgacctgttctgattgttaacttgtcagtacctgggaaatcctgggatggttctagctcgtccgcagatgagatcgatttcatgatcctctgtatcttgtttcgttgcctaggttccgtctaatctatccgtggtatgatgtagatgttttgatcgtgctaactacgtcttgtaaagttaattgtcaggtcataatttttagcatgcctttttttttgtttggttttgtctaattgggctgtcgttctagatcagagtagaagactgttccaaactacctgctggatttattgaacttggatctgtatgtgtgtcacatatcttcataaattcatgattaagatggattgaaatatcttttatctttttggtatggatagttctatatgttggtgtggctttgttagatgtatacatgcttagatacatgaagcaacgtgctgctactgtttagtaattgctgttcatttgtctaataaacagataaggatatgtatttatgttgctgttggttttgctggtactttgttggatacaaatgcttcaatacagaaaacagcatgctgctacgatttaccatttatctaatcttatcatatgtctaatctaataaacaaacatgcttttaaattatcttcatatgcttggatgatggcatacacagcggctatgtgtggttttttaaatacccagcatcatgggcatgcatgacactgctttaatatgctttttatttgcttgagactgtttcttttgtttatactgaccctttagttcggtgactcttctgcaggtcgactttaacttagcctaggatccatggcccagtccaagcacggcctgaccaaggagatgaccatgaagtaccgcatggagggctgcgtggacggccacaagttcgtgatcaccggcgagggcatcggctaccccttcaagggcaagcaggccatcaacctgtgcgtggtggagggcggccccttgcccttcgccgaggacatcttgtccgccgccttcatgtacggcaaccgcgtgttcaccgagtacccccaggacatcgtcgactacttcaagaactcctgccccgccggctacacctgggaccgctccttcctgttcgaggacggcgccgtgtgcatctgcaacgccgacatcaccgtgagcgtggaggagaactgcatgtaccacgagtccaagttctacggcgtgaacttccccgccgacggccccgtgatgaagaagatgaccgacaactgggagccctcctgcgagaagatcatccccgtgcccaagcagggcatcttgaagggcgacgtgagcatgtacctgctgctgaaggacggtggccgcttgcgctgccagttcgacaccgtgtacaaggccaagtccgtgccccgcaagatgcccgactggcacttcatccagcacaagctgacccgcgaggaccgcagcgacgccaagaaccagaagtggcacctgaccgagcacgccatcgcctccggctccgccttgccctccggactcagatctcgatagggtaccaatggccagttaacagatccagctgctgctgttctagggttcacaagtctgcctatttgtcttccccaatggagctatggttgtctggtctggtccttggtcgtgtcccgtttcattgtgtactatttacctgtaatgtgtatccttaagtctggtttgatggtgtctgaaacgttttgctgtggtagagcagcatggaagaactataatgaataagtgatccctaatcattgtgtccaaattttgcttctgctatacccttttgtgctgtttcttatgttttgcttaaaaatttgatctgacaaacaaatttgtctaaattatgctcttgttctgactgtgtactgtacacatttgtattgctaccggtttggcacatagttttctctttgattgcagatcaaacccttctgattgcagattgcttggctatggctgatgtgctcactgttcttctttagcttgtatattgctgatggtggcttggctacggctgaaaaagttgctgctgcgccgacttggcaactgttgctccagtaatgctttgtcctctcttcctagccgccgacttggcacttggcagctgttgctcctgtaatgcgttgttatctcttatctcttgagatgtactatgattttgaggctgtttgacttgtgccagattgccagtgctgatgctatattatctcaggtttttatgctagtatatgttttactgtgtgctgcctgtgtcgagttacgtaatctattgaaccgctatgcgtgttgatgccctgttgttgcttgccagattgatgcccctgttgcttgcagcttgcaagctgtagtgaaatcctaaaattcgaaaccaaatctattctgaacttttgaagatctgtgatgtccggaagaaaagattcaaacagataaacgggactctccagaatctataaaataaatgatcgacaaacgctttgctttggtaggcttcctagttagttagcggaccgaagcttcggtccgggcctagaaggccagcttcggccgccccatttcaaatatttttttcaaaataaaagaatgtagtatatagcaattgcttttctgtagtttataacttcgtatagcatacattatacgaagttatacttttctaatatatgaccaaaatttgttgatgtgcaggtcttcgcctaccccggcggcgcgtccatggagatccaccaggcactcacccgctcccccgtcatcgccaaccacctcttccgccacgagcaaggggaggcctttgccgcctccggctacgcgcgctcctcgggccgcgtcggcgtctgcatcgccacctccggccccggcgccaccaacctagtctccgcgctcgccgacgcgctgctcgattccgtccccatggtcgccatcacgggacaggtggcgcgacgcatgattggcaccgacgccttccaggagacgcccatcgtcgaggtcacccgctccatcaccaagcacaactacctggtcctcgacgtcgacgacatcccccgcgtcgtgcaggaggctttcttcctcgcctcctctggtcgaccagggccggtgcttgtcgacatccccaaggacatccagcagcagatggcggtgcctgtctgggacaagcccatgagtctgcctgggtacattgcgcgccttcccaagccccctgcgactgagttgcttgagcaggtgctgcgtcttgttggtgaatcgcggcgccctgttctttatgtgggcggtggctgcgcagcatctggtgaggagttgcgacgctttgtggagctgactggaatcccggtcacaactactcttatgggcctcggcaacttccccagcgacgacccactgtctctgcgcatgctaggtatgcatgggacggtgtatgcaaattatgcagtggataaggccgatctgttgcttgcacttggtgtgcggtttgatgatcgcgtgacagggaagattgaggcttttgcaagcagggctaagattgtgcacgttgatattgatccggctgagattggcaagaacaagcagccacatgtgtccatctgtgcagatgttaagcttgctttgcagggcatgaatgctcttcttgaaggaagcacatcaaagaagagctttgactttggctcatggaacgatgagttggatcagcagaagagggaattcccccttgggtataaaacatctaatgaggagatccagccacaatatgctattcaggttcttgatgagctgacgaaaggcgaggccatcatcggcacaggtgttgggcagcaccagatgtgggcggcacagtactacacttacaagcggccaaggcagtggttgtcttcagctggtcttggggctatgggatttggtttgccggctgctgctggtgcttctgtggcaaacccaggtgtcactgttgttgacatcgatggagatggtagctttctcatgaacgttcaggagctagctatgatccgaattgagaacctcccagtgaaggtctttgtgctaaacaaccagcacctggggatggtggtgcagttggaggacaggttctataaggccaacagagcgcacacatacttgggaaacccagagaatgaaagtgagatatatccagatttcgtgacgatcgccaaagggttcaacattccagcggtccgtgtgacaaagaagaacgaagtccgcgcagcgataaagaagatgctcgagactccagggccgtacctcttggatataatcgtcccacaccaggagcatgtgttgcctatgatccctagtggtggggctttcaaggatatgatcctggatggtgatggcaggactgtgtactgatgactagctagtcagttaacagatctgccagatcctcggtgtacaaataacccgtcttatcctatgagacgggccggcgtcagtgtgttctggaggaatttttatgtcagagcctttttctttgtgtgcttgatgtagatgccaagggaagcttattggctgttgaagcttgatgcaaaataaattatggaactctgttttttgtttatctaataataactagcaaatatgcttccattgcattgaaactaacagccttttgtgtttccaagttttattttgtgacaatgtcatctatttcaattagttgtggaatcggaaacttgcaggactaacttggaaactccaatccctcagcatcctggactttttcctggtgtaatccatgtagatattattttaatcatcattttagttctggaggtttttccatctccggttttgctcccctttcttcaaaaaaaaaaaaaaaatgccgtaggcgccgcaacgcccacctgttgttcaaactcatgggcacgagtggctcgaagattttatacaacaattgctgtagtttcaccgttgctggtgaagaagcatttttttaaaaaaatatagtggtattcattttaattagtttagttgtgcagcgagcaaaatttggacatgctctgctcggaatctgatcgacctagacacagattagcagcagtagctttgtcatctgttccaagagttgcgatctgatagaagaaaaaaaaaccttcccttcaatgtaaaaccgaaactaacaagaaagaagcacagtgccgtttaggcaagtatggagtacgtattaagcatgtagaaggccatgcatgaaccactaacaagaaagaagcgcagtgccattcaggcaagcataagcatgtagattggcatgcatgaacaactaacagtagatcgtctctggtctgattagaagttttttgggaagccaagaaatcatgtacaactggttccatctcaaattccgtggcaaaaagaggcctaagcaacataaagctttccactggttgccatatatgatttgggcatttcactttgatcttaatgggccttgtaaagcccaagactcatgattatctttagttgatgctcttaattaggtgtgggcaaataattcaaactgtatgtacccgaccaaaaccaaagcaaaaataatcgaaccaaaccgaaaatttaaaaataaccgaatgaaaactaaatcctataactgaaagaactgaaaccgaatcaaaatatttaatgtaaccaaaaatatccgaaatataattatattgtcaaaaatattaataatttctagattaaataattaaaaatacttaaaaatttatataaaatagtaaaaatactcgaaaataaccacaaatattcaaaaacaaccgaaatatcccaaaatattcaaagcaaaataaccgaatggataccaaattttaaaaccgaaaaaactggaacaaaaccaaaatcgaaccaaaatttcaaaaatcgaataaatactaaactttagaacaaaaaaaaacgataaccgaatgtatacgaaccaaagccgaattagataaccgaacgtccaggactactcttaatctttccgccacttatgatttgggctattactttgtttataatgagccttttcaagctcaagttcatgattgtccgtgagatgagaaactgacttgttggattcgaaaccctagctagtattggttaatacttaatacataaatgacctgcattgacatcatcatccaagaaaataaaaattgtatgcttgagatatttagttttcctagctaggttttctttattttagtaccgaatctttaggtgtgccacgttaatttagacccattttttcatacttaccaactgagtctagtttaatcatgactataatcgtataaaatgattcagtcgacgtcattgcgaacgtatataaaatcatccaaattgacgtcattccaaagaggtaagcatgcttatctaagagtccgagcatactaaacaagacgacattttatttgcactccaaatcaaattttgtattgcctaaagaaaaacaatcaaactcaagtttcttaaaattaatttcattcaaactaatcactttcaatatctcacatattattcatgccatttctatttgtctaaacatgatttaaaaaaaaaagtaaaatacaaagattactatgcaaaaactctataaaaaaaaattcaaatttcttatttatttgtgacatcaaattttcaaaataatttttttaattatcggttgatccggtcagtcgataaaaacataaactttcagcgaccgttaaaactttcctactaccgatttagagaaaatcttagcttgaaacgtaattgtaacctgccttcatgcaagtcgcaagatatgtcatcctaagttgtatatgttttctcaaaagatgtatttacttgagaaaatacgtttcaacgttgatggacaaccaattaagaatcaagcacctttcgtaatcaatttaggcttatcgtctaaggtatactgatttacgacagttgactagacttataaggaacaaaataatagaatagtttctaaacacttcacctaatcatagagactaagatggtaattcgtaaacgacaaagcctagtgacactgtccattgtaaaattccacatcatattagtattaaacatatacatgtagtttcctgaacacatgtagtatcaaacacacttcgtggcttcttcctcgaaacctgcggccgctcattaattaagtcatctagttgaaggatcgctatcaactttgtatagaaaagttgggccgaattcgagctcggtacggccagaatggcccggaccgaagcttatcttgcaagagcatccggccggatattgctttgcaaagatttgctagctagcagcacatgagatcgagttatgatctccaggtgtactcatgctctccttatgtttggatatactgatcttggatatctatagaagatccccaggtacaagatcaatgacatacttctgcacacttcgtgggattgtacagaatgatatactacatactgaaggtatgtggtggtcatgattttatatcattgaccttattatctataaagataatattacttggtgttgtttagatgaaaaacaagttacaaactaagtctctaccttacttcacattttaaatgtgtttgagagcaggtatgggatgacttagtaatttgcaaagatcagggggagtttcctcttgatcgaaagaacttgtttatacatcatggtgtactcttttctttgcatgagttttcccctgtttgggtttctcattcaaagtttttaacgaggcaacatcaacataaggcctatgtcgtatcatctatttttcccgtagaggttttcgaggatgatacattatggcatagttattgttgtatttgaactaggtgataagtttatctccctagagttcaaatgaatcaacaatagagtatgactactctccttatttctcccactgggtttttaaggagactcagctaatatgttgatttctcagattttctggcaagattatcttggagaaatattagcctgagttatatgtctcatcatttattttccccactggggtttttgagatgatgactatagacatgttattgttctttggtctagaggtccattggagaacaatatcgtaccatggttcaattgaaccaccgacaattatctataaggataattgagcttgtgttgttcagatggaaacaggttatatgaggagcaacatattgctcctaaattgttttatccccatgaacttcaggaaaatgaagatataaacatcttgcaaacaaagtcttgtgataatcttgctgatctattcacaaaatctctaccatactcaacgttttcagaaatgtgttgaggtgattggtatgagaagactcaagtgtttgcaagatcagggggagtaattctccgtgatatttgacctgttttataccatcatattacactcttttctttgtatgagttttgccttgttaaggttttctcatccaaagtttttaacgaggtaatatcaactaagctatatgcttcatcattcactttttcccacaggggtttttatgcatgatgattacaagcatattcttttggagttcaatatgagttttactcataatccaaaagacattgtgtactccttatttttcccacagggtttttgaggagatgatatattggaagacaacttgcagatgatctagtggacttggattgatcaagggggagtgttacaaaatattgtcatgtgatcaaccctctcccctgacagttttctttcaagggacacaccccttgggagacactgtatccacatgtatataaaccagattatctgcaataaagatctacaactgtcatttgtctctctctcaatctcgttactactgagtatactataacaggttcgaccaaaaatagcaaatggtggtctggcttctcgtcatgcatggttttacacgtgtacaggcgagaaagctcatcttaacaaatttaataacccaaatatatatgcatagaaatacccgaccatttgtttgttgagctagcgtgtggctcgcctttggcctcgcctgacctcaccttatatttctaataataccacgtctccctccttatatttaccctcttctcccaagagaaaaatcgggctccaatgcaaacaccagttttctaccctaaacacaagaacccagatgcataataaaaggtgaaagctagcagaagaggtacctaactctaccctactatagagaaaaagtcagcacattgcaagcaataataggatccatggatcaccaccgcacgccgatggagaactcggcgtcctcgaagccgccgacgccggcgtccacgcccaactcgcgcctcgcatcggcgccgtcaccccgccactccgccacgccgccgcacgcgtccgcgccggcgtccgccccggcgccggcctcgcgcaccgtctacagcgaccgcttcatccccagccgcgccggatccaacctcgcgctcttcgacctcggcccctcgccctcgcccgccgccgccgccgcctcctcgtcctcctcccacgaggccggccccgcggcctcgtccggatctgcgcccgccgcggcgtcgccctactgcgcgctcctccgcgccgcgctcttcgggcccgacacgcccgaccgggtcgcgtcctcggccgccgcgtgctcgtcctcctcctcctccccggggctctcgcctgtgggcacccccgccaccgggaacatcttcagattcaagacggaggtgcgccggaacgccaagagggcgcttttttccggaggggaggaggaggaggacgccctgttccccggcattttcaccaccaggggcgcgggaccaaggaaggtcccgaggtcgccctacaaggtgctggatgcgcctgcgttgcaggacgacttctacctcaacctcgtcgattggtcttcacataacgtcctcgctgttgggttgggcaattgcgtttacctgtggaatgcatgcagcagcaaggtcaccaagctttgcgatttgggggtggatgacaacgtttgttctgtggggtgggcgcagcgcggcactcaccttgcagtaggaacaaatcaaggaaaagttcagatctgggatgcaactcgctgtaaaagaataaggacaatggaaagccatcgcatgcgtgtaggtgctcttgcatggagttcttcgttgctttcttctggaagccgtgacaagagcatcctccaccatgatatccgtgctcaagaagatcatgttagcaagcttaccgggcataaatctgaggtttgtggactcaagtggtcttatgacaatcgtcagcttgcatcgggtggcaatgacaacagactttttgtttggaatccacattcagtacagccagtactgaagtatactgagcacacagcagctgtcaaagctattgcctggtcacctcatctccatgggctgcttgcatctggtggaggaactgcagatagatgcatacgattttggaatacgaccacaaatgcacacttgagctgtgtggacactggcagccaggtctgcaatctcgcgtggtcaaagaatgtaaatgagcttgttagcacccacggctactctcagaaccaaataattgtttggagatatccaacaatgtcgaagcttgccactttgacagggcatacatacagagtattgtacttagctatttcccctgatggccagaccatagttactggtgctggtgatgaaacgctccggttttggaacgtgttcccctctccaaagtcccagagttctgatagtttaagttgtgtcggaggaacatctttcgttagaagctacatccggtgaatttaaatgcccgggcgatcgctcgaggcgtacctagtggtaccacatggttaacctagacttgtccatcttctggattggccaacttaattaatgtatgaaataaaaggatgcacacatagtgacatgctaatcactataatgtgggcatcaaagttgtgtgttatgtgtaattactagttatctgaataaaagagaaagagatcatccatatttcttatcctaaatgaatgtcacgtgtctttataattctttgatgaaccagatgcatttcattaaccaaatccatatacatataaatattaatcatatataattaatatcaattgggttagcaaaacaaatctagtctaggtgtgttttgcgaatgcggccgccaccgcggtggagctcgaattccggtccgggcctagaaggccagcttcaagtttgtacaaaaaagcaggctccggccagaatggcccggaccgggttaccgaattcgagctcggtaccctgggatccgatatcgatgggccctggccgaagcttggtcacccggtccgggcctagaaggccgatctcccgggcacccagctttcttgtacaaagtggccgttaacggatcggccagaatggcccggaccgaagcttgcatgcctgcagtgcagcgtgacccggtcgtgcccctctctagagataatgagcattgcatgtctaagttataaaaaattaccacatattttttttgtcacacttgtttgaagtgcagtttatctatctttatacatatatttaaactttactctacgaataatataatctatagtactacaataatatcagtgttttagagaatcatataaatgaacagttagacatggtctaaaggacaattgagtattttgacaacaggactctacagttttatctttttagtgtgcatgtgttctcctttttttttgcaaatagcttcacctatataatacttcatccattttattagtacatccatttagggtttagggttaatggtttttatagactaatttttttagtacatctattttattctattttagcctctaaattaagaaaactaaaactctattttagtttttttatttaataatttagatataaaatagaataaaataaagtgactaaaaattaaacaaataccctttaagaaattaaaaaaactaaggaaacatttttcttgtttcgagtagataatgccagcctgttaaacgccgtcgacgagtctaacggacaccaaccagcgaaccagcagcgtcgcgtcgggccaagcgaagcagacggcacggcatctctgtcgctgcctctggacccctctcgagagttccgctccaccgttggacttgctccgctgtcggcatccagaaattgcgtggcggagcggcagacgtgagccggcacggcaggcggcctcctcctcctctcacggcaccggcagctacgggggattcctttcccaccgctccttcgctttcccttcctcgcccgccgtaataaatagacaccccctccacaccctctttccccaacctcgtgttgttcggagcgcacacacacacaaccagatctcccccaaatccacccgtcggcacctccgcttcaaggtacgccgctcgtcctcccccccccccctctctaccttctctagatcggcgttccggtccatgcatggttagggcccggtagttctacttctgttcatgtttgtgttagatccgtgtttgtgttagatccgtgctgctagcgttcgtacacggatgcgacctgtacgtcagacacgttctgattgctaacttgccagtgtttctctttggggaatcctgggatggctctagccgttccgcagacgggatcgatttcatgattttttttgtttcgttgcatagggtttggtttgcccttttcctttatttcaatatatgccgtgcacttgtttgtcgggtcatcttttcatgcttttttttgtcttggttgtgatgatgtggtctggttgggcggtcgttctagatcggagtagaattctgtttcaaactacctggtggatttattaattttggatctgtatgtgtgtgccatacatattcatagttacgaattgaagatgatggatggaaatatcgatctaggataggtatacatgttgatgcgggttttactgatgcatatacagagatgctttttgttcgcttggttgtgatgatgtggtgtggttgggcggtcgttcattcgttctagatcggagtagaatactgtttcaaactacctggtgtatttattaattttggaactgtatgtgtgtgtcatacatcttcatagttacgagtttaagatggatggaaatatcgatctaggataggtatacatgttgatgtgggttttactgatgcatatacatgatggcatatgcagcatctattcatatgctctaaccttgagtacctatctattataataaacaagtatgttttataattattttgatcttgatatacttggatgatggcatatgcagcagctatatgtggatttttttagccctgccttcatacgctatttatttgcttggtactgtttcttttgtcgatgctcaccctgttgtttggtgttacttctgcaggtcgactttaacttagcctaggatccatggcctcctccgagaacgtcatcaccgagttcatgcgcttcaaggtgcgcatggagggcaccgtgaacggccacgagttcgagatcgagggcgagggcgagggccgcccctacgagggccacaacaccgtgaagctgaaggtgaccaagggcggccccctgcccttcgcctgggacatcctgtccccccagttccagtacggctccaaggtgtacgtgaagcaccccgccgacatccccgactacaagaagctgtccttccccgagggcttcaagtgggagcgcgtgatgaacttcgaggacggcggcgtggcgaccgtgacccaggactcctccctgcaggacggctgcttcatctacaaggtgaagttcatcggcgtgaacttcccctccgacggccccgtgatgcagaagaagaccatgggctgggaggcctccaccgagcgcctgtacccccgcgacggcgtgctgaagggcgagacccacaaggccctgaagctgaaggacggcggccactacctggtggagttcaagtccatctacatggccaagaagcccgtgcagctgcccggctactactacgtggacgccaagctggacatcacctcccacaacgaggactacaccatcgtggagcagtacgagcgcaccgagggccgccaccacctgttcctgtagggtaccacatggttaacctagacttgtccatcttctggattggccaacttaattaatgtatgaaataaaaggatgcacacatagtgacatgctaatcactataatgtgggcatcaaagttgtgtgttatgtgtaattactagttatctgaataaaagagaaagagatcatccatatttcttatcctaaatgaatgtcacgtgtctttataattctttgatgaaccagatgcatttcattaaccaaatccatatacatataaatattaatcatatataattaatatcaattgggttagcaaaacaaatctagtctaggtgtgttttgcgaatgcggccgccaccgcggtggagctcgaattccggtccgggcctagaaggccagcttcggccgccccgggcaactttattatacaaagttgatagatcctcatgtcttcatcgtaagcttaaacaggccagaatggcctctggattcagcggcctagaaggccgaagtacttggtcttcctagtcgagtagatcacattcaagcttggtcacccggtccgtcaatattctgattccgatgacttcgtaggttcctagctcaagccgctcgtgtccaagcgtcacttacgattagctaatgattacggcatctaggaccgactagtggcgcgccgactagctagctaaggtaccgagctcgaattcattccgattaatcgtggcctcttgctcttcaggatgaagagctatgtttaaacgtgcaagcgctactagacaattcagtacattaaaaacgtccgcaatgtgttattaagttgtctaagcgtcaatttgtttacaccacaatatatcctgcca

SEQ ID NO: 50 - DNA, 28266 bp, Artificial Sequence
  RX000018
gtttacccgccaatatatcctgtcaaacactgatagtttaaactgaaggcgggaaacgacaatctgatcatgagcggagaattaagggagtcacgttatgacccccgccgatgacgcgggacaagccgttttacgtttggaactgacagaaccgcaacgttgaaggagccactcagcaagctggtacgattgtaatacgactcactatagggcgaattgagcgctgtttaaacgctcttcaactggaagagcggttacgctgtttaaacgctcttcaactggaagagcggttactaccggttcactagctagctgctaatcgagctagttaccctatgaggtgacatgaagcgctcacggttactatgacggttagcttcacgactgttggtggcagtagcgtacgacttagctatagttccggacttacccttaagcgatttaaatctgcggttaccgaattcgagctcggtaccctgggatctgcccttactttaacgcctctaaccaacacccctttatctttataaggaacaataaacagaatttgccccactgttctaaatcacctaataatatccccagctaaaaacaataaaggtttcctagaattaagacaagcatgactgttcctccaggagggtttggaacattgttgcagtcttgcagatacgggcgaagggtgagaaacagagcggagggctggaggtgacctcggtagtcgacgccggagttgagcttgacaacgacggggcggcccctgatggacttgaggaagtccgatggcgtcttcaccgtcccgccggcgcccgaggcgggcctgtcgctgccgccgccgccgctgctcatcttgcgcgctgtgcccccggcggtgtccctgtgttgcggatcgcgggtgggccaggtggatgcgagggcgacccgtttggactccggccggagccgccggatccctggtcggtgtcagtgccgtttactctgggccccacgtgtcagtaccgtctgtagatgacaacaacccgtcgtccacagtcatgtccaaaatatcctttcttcttttttttcgattcggatatctatcttccttttttttttccaaaaatcttcttgacgcaccagcgcgcacgtttgtggtaaacgccgacacgtcggtcccacgtcgatagaccccacccaccagtgagtagcgtgtacgtattcgggggtgacggacgtgtcgccgtcgtcttgctagtcccattcccatctgagccacacatctctgaacaaaaaaaaggagggaggcctccacgcacatccccctccgtgccacccgccccaaaccctcgcgccgcctccgagacagccgccgcaaccatggccaccgccgccgccgcgtctaccgcgctcactggcgccactaccgctgcgcccaaggcgaggcgccgggcgcacctcctggccacccgccgcgccctcgccgcgcccatcaggtgctcagcggcgtcacccgccatgccgatggctcccccggccaccccgctccggccgtggggccccaccgagccccgcaagggtgctgacatcctcgtcgagtccctcgagcgctgcggcgtccgcgacgtaagtttctgcttctacctttgatatatatataataattatcattaattagtagtaatataatatttcaaatatttttttcaaaataaaagaatgtagtatatagcaattgcttttctgtagtttataacttcgtatagcatacattatacgaagttatacttttctaatatatgaccaaaatttgttaccgaattcaggcgacccatcgctgctttgtctacatcatgttcttcatcatcctccccaggcgacgcgtgctgctgttcttattcagactaccgttcgagtgactgcatggcgtacatctttctgcatcgactttgtacggctacatcgaacatatacacgagatgtctcgtgtgaatagagtcactaatgccttaagcatcggttactccgtagggtacattctgttcttcttatttgtgcatatttttattgttgtttactgattatacgagtagttatacatacatgcacatacatatcatcacatatatcacaatatttttctaaattaaattaaaactaaaaatgactaaatttctaacaccaacgacattgtaatgttttctccaacaactttacctattctacattgttctatttcgaatttcactctataaacaacatagtctacaatggaaaacagtgctttgtacgactatatacgcgatgtgtggctacaacataagacaatatagtcgtttgaagattgaacctatatatcggtacggttaatccgtctatgtacgtgggcatgacgaacacccgtgataacgaaggattaacgtgcacaatcataaatccaaagtaggagcggtgcatgatgagaatcgctctcagtactcgacataatgaaccttacgaggtacaacaggcaggcaggcagggaccaggggccgcctttatttcaggctcgctggccccacgggcgtgctgcgtgcacgaagggcactaccccaacctctcaccgaaaaccgcgctggatcggcaaatcaaacgaggtggtgccccgtgcccactctccacgtccacggcaccatccctctgcagccgctcaccagccatgccgtgtcgcggaacggcacaaccacccccaacccactcacgaaaccccgtcccggccgtgcccgtgtcggtccgcgctcggcaacgaggcggcccgcgctgctgagtcccctggacacccgacaccctgtcggccctttgtttattcatcccgaaatctcatctgcccccacggccgactgcgctgcgccgcccggatatatatacccatcgttatcgatcgactggggactctatcagtgatagagtctagaggatcgctcaggaaggccgctgagatagaggcatggcggccaatgcgggcggcggtggagcgggaggaggcagcggcagcggcagcgtggctgcgccggcggtgtgccgccccagcggctcgcggtggacgccgacgccggagcagatcaggatgctgaaggagctctactacggctgcggcatccggtcgcccagctcggagcagatccagcgcatcaccgccatgctgcggcagcacggcaagatcgagggcaagaacgtcttctactggttccagaaccacaaggcccgcgagcgccagaagcgccgcctcaccagcctcgacgtcaacgtgcccgccgccggcgcggccgacgccaccaccagccaactcggcgtcctctcgctgtcgtcgccgccgccttcaggcgcggcgcctccctcgcccaccctcggcttctacgccgccggcaatggcggcggatcggctgtgctgctggacacgagttccgactggggcagcagcggcgctgccatggccaccgagacatgcttcctgcaggactacatgggcgtgacggacacgggcagctcgtcgcagtggccacgcttctcgtcgtcggacacgataatggcggcggccgcggcgcgggcggcgacgacgcgggcgcccgagacgctccctctcttcccgacctgcggcgacgacggcggcagcggtagcagcagctacttgccgttctggggtgccgcgtccacaactgccggcgccacttcttccgttgcgatccagcagcaacaccagctgcaggagcagtacagcttttacagcaacagcaacagcacccagctggccggcaccggcaaccaagacgtatcggcaacagcagcagcagccgccgccctggagctgagcctcagctcatggtgctccccttaccctgctgcagggagtatgtgagagcaacgcgagctgccactgctcttcactggtaccgttaacagatcattcgacaaagcagcattagtccgttgatcggtggaagaccactcgtcagtgttgagttgaatgtttgatcaataaaatacggcaatgctgtaagggttgttttttatgccattgataatacactgtactgttcagttgttgaactctatttcttagccatgccaagtgcttttcttattttgaataacattacagcaaaaagttgaaagacaaaaaaaaaaacccccgaacagagtgctttgggtcccaagcttctttagactgtgttcggcgttccccctaaatttctccccctatatctcactcacttgtcacatcagcgttctctttccccctatatctccacgctctacagcagttccacctatatcaaacctctataccccaccacaacaatattatatactttcatcttcaactaactcatgtaccttccaatttttttctactaataattatttacgtgcacagaaacttagcaaggagagagagagcggggtgacccaccttgctagttggatattacctcttctcttcaaagtatccttgaacgctcaccggttatcaaatctctacactatagctctgtagtcttgctagatagttagttctttagctctcggtgaccaagcttggcgcgatcaagcttatcgataccgtcgacctcgaagcttggtcacccggtccgggcctagaaggccagcttcaagtttgtacaaaaaagcaggctccggccagaatggcccggaccgggttaccgaattcttaccctagctccctgcggctgttacgcggtcccccatcaatcttctgttcttgcggttgtagcctgtgtaacagtgctagagtatgtatgataaataggttttaagtctgcttacatgacattttttattgtggaagagacatataaaaattagagagagtggttctcatgcaacggcggacggcccggtgctaaaagagcttcaagacaaaataatgaaacaggaagagagtagatttatctaagagccaactttattatatgaatgtgtttattgttggctttagatgatatggtaaggagttagagctaataatagataggctctattattattattattaattaaactcgctctaaggaggaaagtgggaggaagggacgaggacgaagactactggaagcatcgtgcatggatgatggatgtggtgtctcttaatgtaggtggccggaggatgtacgtgttaattgcgcgataagcactcagatccaaccgcaaactacctccacactgacacactgatagagagaaagagagacctccgacgactgccgccgcagatgagccacgtacgtatacgacgtctgccggccggctcaggctgccgccatcaccctgctcgaaagtcgcgttaggcggcgccagctacataggagtatctagtctagccagttagtatactactactgcgctgatgatgaattaactctgcatagatactgtacttgcctccctccaacacccaaccacctcctgctcggctcttaataacttggacacggatcgatgccatccaaggaagaacacgacgacgacgacggaacatccaccatgcaagcttgcatccatacgccgatacgcgtgcatccatccatccaccattatttccattttccaccgatcacacgtacacaggcctatttaaggagcgacatcccactgcaactctcctcaccactcatcaccagctagctctagcaaagcacttgccatctaccgaccgccgcattccaaacagcccgacgagctagcagagcggcaggcacctccctcctcaaggaacccatggccactgtgaacaactggctcgctttctccctctccccgcaggagctgccgccctcccagacgacggactccacactcatctcggccgccaccgccgaccatgtctccggcgatgtctgcttcaacatcccccaagattggagcatgaggggatcagagctttcggcgctcgtcgcggagccgaagctggaggacttcctcggcggcatctccttctccgagcagcatcacaaggccaactgcaacatgatacccagcactagcagcacagtttgctacgcgagctcaggtgctagcaccggctaccatcaccagctgtaccaccagcccaccagctcagcgctccacttcgcggactccgtaatggtggcttcctcggccggtgtccacgacggcggtgccatgctcagcgcggccgccgctaacggtgtcgctggcgctgccagtgccaacggcggcggcatcgggctgtccatgattaagaactggctgcggagccaaccggcgcccatgcagccgagggtggcggcggctgagggcgcgcaggggctctctttgtccatgaacatggcggggacgacccaaggcgctgctggcatgccacttctcgctggagagcgcgcacgggcgcccgagagtgtatcgacgtcagcacagggtggagccgtcgtcgtcacggcgccgaaggaggatagcggtggcagcggtgttgccggcgctctagtagccgtgagcacggacacgggtggcagcggcggcgcgtcggctgacaacacggcaaggaagacggtggacacgttcgggcagcgcacgtcgatttaccgtggcgtgacaaggcatagatggactgggagatatgaggcacatctttgggataacagttgcagaagggaagggcaaactcgtaagggtcgtcaagtctatttaggtggctatgataaagaggagaaagctgctagggcttatgatcttgctgctctgaagtactggggtgccacaacaacaacaaattttccagtgagtaactacgaaaaggagctcgaggacatgaagcacatgacaaggcaggagtttgtagcgtctctgagaaggaagagcagtggtttctccagaggtgcatccatttacaggggagtgactaggcatcaccaacatggaagatggcaagcacggattggacgagttgcagggaacaaggatctttacttgggcaccttcagcacccaggaggaggcagcggaggcgtacgacatcgcggcgatcaagttccgcggcctcaacgccgtcaccaacttcgacatgagccgctacgacgtgaagagcatcctggacagcagcgccctccccatcggcagcgccgccaagcgcctcaaggaggccgaggccgcagcgtccgcgcagcaccaccacgccggcgtggtgagctacgacgtcggccgcatcgcctcgcagctcggcgacggcggagccctggcggcggcgtacggcgcgcactaccacggcgccgcctggccgaccatcgcgttccagccgggcgccgccagcacaggcctgtaccacccgtacgcgcagcagccaatgcgcggcggcgggtggtgcaagcaggagcaggaccacgcggtgatcgcggccgcgcacagcctgcaggacctccaccacctgaacctgggcgcggccggcgcgcacgactttttctcggcagggcagcaggccgccgccgctgcgatgcacggcctgggtagcatcgacagtgcgtcgctcgagcacagcaccggctccaactccgtcgtctacaacggcggggtcggcgacagcaacggcgccagcgccgtcggcggcagtggcggtggctacatgatgccgatgagcgctgccggagcaaccactacatcggcaatggtgagccacgagcaggtgcatgcacgggcctacgacgaagccaagcaggctgctcagatggggtacgagagctacctggtgaacgcggagaacaatggtggcggaaggatgtctgcatgggggactgtcgtgtctgcagccgcggcggcagcagcaagcagcaacgacaacatggccgccgacgtcgggcatggcggcgcgcagctcttcagtgtctggaacgacacttaagcgtacctagtggtacctgacatcttatagtctgcaacctctcgtgtctgaattcctatctttatcaagtgttattgcttccacgactataggacagctttcgtcgaaagcttttgctcatgtgatctcgaaggattcatctagtctgatttttcgtgacttgtatcggttttattggattcatccaacatatatcaataaaaaatgagttgtgtttcctttcttcctagttcagttaaaattatttccctcctgcgcttgtgctgtaattgtctgtgtacctgttgtttgtgactgtgttagttcccttggatatgatttcgtatttgatatgtacatggagatagcttagcttcattattggagtatgaagttagtatgacatagtcactctcctggaaaattgacactgcaaaccatatttttattctgaaccacaaatcctagtcagtccgctggcatatgccgtccgtttgctgaatccagaacgtgggtttggagatgtacggctgagatgcctctatgcgaaggggatttcgtggtgaaacgagatgggagtagagcaacgcccgtggaagatgcttcaaacttccacacttttgagcaacgatcggcagtagtaaggtagacgatttcaagatcaaagcatatgaagataaacaacatcaacaacaaaatttgttggggttctatagagagaaacagagctacatacatacactgttttgtatctaccatctgagatgatgaaaagatgaaaaactaaagaatgccccggcgccaacgccaggacacgccgcgcgcgcgtcacccgagccatctcttgacccagccggcgctgtatatttacacacgttgcagcatcgatcaccacctgttcgatcgcgtcgccgtcaccgggatctgagtcgaaacctagacttgtccatcttctggattggccaacttaattaatgtatgaaataaaaggatgcacacatagtgacatgctaatcactataatgtgggcatcaaagttgtgtgttatgtgtaattactagttatctgaataaaagagaaagagatcatccatatttcttatcctaaatgaatgtcacgtgtctttataattctttgatgaaccagatgcatttcattaaccaaatccatatacatataaatattaatcatatataattaatatcaattgggttagcaaaacaaatctagtctaggtgtgttttgcgaatgcgaccttcttatgtgcttctagtctccaaatgtggttgatagttattttgctctaagatcaacagtaatgaagtataaatcatcgttgtggtgtgctactcggttaattgagcattaacacacacaaacatgacgaggatggtataatctccaaaaatgtgtactttgttaggtgggaccctatagccttgattaatgtgctatgttaggcatgcctggaaacgtgtgacgcatatgttttgtgaacctgttgatattatatgtgcttttatattaccatattttattaaaatactaatatttattactagtaagatataacattctatctagcttaaaaactaaccataaatattccataataactagatttaccaaactaatatactaaatatacataataaatacaaaattaacaagacaataatcaatatttatgagcttaatatatttagacattatggttggtcgacgataatcatgctaacttttcgtaattgcttgattgaaatatgcttagaataatgcctctttgttctacatggcaaatagggaccattatggtgtaacaccctgggaaccacaaacaccccgaaatgctactaaactacacaactaaccttcatatataaaatttcgacagcatctcctttgaaaatttgcatagacgtggaagcaacagagtataaacagatatcatgataagaaaacatactagacattaataatctgctagaaatgggaagaatcctaacttgacgactgcgtaactgactagagtcacacttagctgaccctagtcacttacaactgacttcgtgtcctagatcgatgggccctggccgaagcttggtcacccggtccgggcctagaaggccagcttcaagtttgtaccctggagcttgccgagtgccatccttggacactcgataaagtatattttattttttttattttgccaaccaaactttttgtggtatgttcctacactatgtagatctacatgtaccattttggcacaattacatatttacaaaaatgttttctataaatattagatttagttcgtttatttgaatttcttcggaaaattcacatttaaactgcaagtcactcgaaacatggaaaaccgtgcatgcaaaataaatgatatgcatgttatctagcacaagttacgaccgatttcagaagcagaccagaatcttcaagcaccatgctcactaaacatgaccgtgaacttgttatctagttgtttaaaaattgtataaaacacaaataaagtcagaaattaatgaaacttgtccacatgtcatgatatcatatatagaggttgtgataaaaatttgataatgtttcggtaaagttgtgacgtactatgtgtagaaacctaagtgacctacacataaaatcatagagtttcaatgtagttcactcgacaaagactttgtcaagtgtccgataaaaagtactcgacaaagaagccgttgtcgatgtactgttcgtcgagatctctttgtcgagtgtcacactaggcaaagtctttacggagtgtttttcaggctttgacactcggcaaagcgctcgattccagtagtgacagtaatttgcatcaaaaatagctgagagatttaggccccgtttcaatctcacgggataaagtttagcttcctgctaaactttagctatatgaattgaagtgctaaagtttagtttcaattaccaccattagctctcctgtttagattacaaatggctaaaagtagctaaaaaatagctgctaaagtttatctcgcgagattgaaacagggccttaaaatgagtcaactaatagaccaactaattattagctattagtcgttagcttctttaatctaagctaaaaccaactaatagcttatttgttgaattacaattagctcaacggaattctctgtttttctaaaaaaaaactgcccctctcttacagcaaattgtccgctgcccgtcgtccagatacaatgaacgtacctagtaggaactcttttacacgctcggtcgctcgccgcggatcggagtccccggaacacgacaccactgtggaacacgacaaagtctgctcagaggcggccacaccctggcgtgcaccgagccggagcccggataagcacggtaaggagagtacggcgggacgtggcgacccgtgtgtctgctgccacgcagccttcctccacgtagccgcgcggccgcgccacgtaccagggcccggcgctggtataaatgcgcgccacctccgctttagttctgcatacagccaacccaaggatgtccaacctgctcacggttcaccagaaccttccggctcttccagtggacgcgacgtccgatgaagtcaggaagaacctcatggacatgttccgcgacaggcaagcgttcagcgagcacacctggaagatgctgctctccgtctgccgctcctgggctgcatggtgcaagctgaacaacaggaagtggttccccgctgagcccgaggacgtgagggattaccttctgtacctgcaagcgcgaggtttgtttctgcttctacctttgatatatatataataattatcattaattagtagtaatataatatttcaaatatttttttcaaaataaaagaatgtagtatatagcaattgcttttctgtagtttataagtgtgtatattttaatttataacttttctaatatatgaccaaaacatggtgatgcctaggtctggcagtgaagaccatccagcaacaccttggacaactgaacatgcttcacaggcgctccggcctcccgcgccccagcgactcgaacgccgtgagcctcgtcatgcgccgcatcaggaaggaaaacgtcgatgccggcgaaagggcaaagcaggccctcgcgttcgagaggaccgatttcgaccaggtccgcagcctgatggagaacagcgacaggtgccaggacattaggaacctggcgttcctcggaattgcatacaacacgctcctcaggatcgcggaaattgcccgcattcgcgtgaaggacattagccgcaccgacggcggcaggatgcttatccacattggcaggaccaagacgctcgtttccaccgcaggcgtcgaaaaggccctcagcctcggagtgaccaagctcgtcgaacgctggatctccgtgtccggcgtcgcggacgacccaaacaactacctcttctgccgcgtccgcaagaacggggtggctgcccctagcgccaccagccaactcagcacgagggccttggaaggtattttcgaggccacccaccgcctgatctacggcgcgaaggatgacagcggtcaacgctacctcgcatggtccgggcactccgcccgcgttggagctgctagggacatggcccgcgccggtgtttccatccccgaaatcatgcaggcgggtggatggacgaacgtgaacattgtcatgaactacattcgcaaccttgacagcgagacgggcgcaatggttcgcctcctggaagatggtgactgagctagacccagctttcttgtacaaagtggccgttaacggatccagacttgtccatcttctggattggccaacttaattaatgtatgaaataaaaggatgcacacatagtgacatgctaatcactataatgtgggcatcaaagttgtgtgttatgtgtaattactagttatctgaataaaagagaaagagatcatccatatttcttatcctaaatgaatgtcacgtgtctttataattctttgatgaaccagatgcatttcattaaccaaatccatatacatataaatattaatcatatataattaatatcaattgggttagcaaaacaaatctagtctaggtgtgttttgcgaattgcggcaagctgttaccgaattcctgcccttaaggccaattgttcaagattcattcaacaattgaaacatctcccatgattaaatcagtataaggttgctatggtcttgcttgacaaagtttttttttgagggaatttcaactaaatttttgagtgaaactatcaaatactgattttaaaaaatttttataaaaggaagcgcagagataaaaggccatctatgctacaaaagtacccaaaaatgtaatcctaaagtatgaattgcattttttttttgtttggacgaaaggaaaggagtattaccacaagaatgatatcatcttcatatttagatcttttttgggtaaagcttgagattctctaaatatagagaaatcagaagaaaaaaaaaccgtgttttggtggttttgatttctagcctccacaataactttgacggcgtcgacaagtctaacggacaccaagcagcgaaccaccagcgccgagccaagcgaagcagacggccgagacgttgacaccttcggcgcggcatctctcgagagttccgctccggcgctccacctccaccgctggcggtttcttattccgttccgttccgcctcctgctctgctcctctccacaccacacggcacgaaaccgttacggcaccggcagcacccagcacgggagaggggattcctttcccaccgttccttccctttccgccccgccgctataaatagccagccccatccccagcttttttccccaatctcatctcctctctcctgttgttcggagcacacgcacaatccgatcgatccccaaatccccttcgtctctcctcgcgagcctcgtggatcccagcttcaaggtacggcgatcgatcatcccccctccttctctctaccttcttttctctagactacatcggatggcgatccatggttagggcctgctagtttcccttcctgttttgtcgatggctgcgaggcacaatagatctgatggcgttatgacggctaacttgtcatgttgttgcgatttatagtccctttaggagatcagtttaatttctcggatggttcgagatcggtggtccatggttagtaccctaagatccgcgctgttagggttcgtagatggaggcgacctgttctgattgttaacttgtcagtacctgggaaatcctgggatggttctagctcgtccgcagatgagatcgatttcatgatcctctgtatcttgtttcgttgcctaggttccgtctaatctatccgtggtatgatgtagatgttttgatcgtgctaactacgtcttgtaaagttaattgtcaggtcataatttttagcatgcctttttttttgtttggttttgtctaattgggctgtcgttctagatcagagtagaagactgttccaaactacctgctggatttattgaacttggatctgtatgtgtgtcacatatcttcataaattcatgattaagatggattgaaatatcttttatctttttggtatggatagttctatatgttggtgtggctttgttagatgtatacatgcttagatacatgaagcaacgtgctgctactgtttagtaattgctgttcatttgtctaataaacagataaggatatgtatttatgttgctgttggttttgctggtactttgttggatacaaatgcttcaatacagaaaacagcatgctgctacgatttaccatttatctaatcttatcatatgtctaatctaataaacaaacatgcttttaaattatcttcatatgcttggatgatggcatacacagcggctatgtgtggttttttaaatacccagcatcatgggcatgcatgacactgctttaatatgctttttatttgcttgagactgtttcttttgtttatactgaccctttagttcggtgactcttctgcaggtcgactttaacttagcctaggatccatggcccagtccaagcacggcctgaccaaggagatgaccatgaagtaccgcatggagggctgcgtggacggccacaagttcgtgatcaccggcgagggcatcggctaccccttcaagggcaagcaggccatcaacctgtgcgtggtggagggcggccccttgcccttcgccgaggacatcttgtccgccgccttcatgtacggcaaccgcgtgttcaccgagtacccccaggacatcgtcgactacttcaagaactcctgccccgccggctacacctgggaccgctccttcctgttcgaggacggcgccgtgtgcatctgcaacgccgacatcaccgtgagcgtggaggagaactgcatgtaccacgagtccaagttctacggcgtgaacttccccgccgacggccccgtgatgaagaagatgaccgacaactgggagccctcctgcgagaagatcatccccgtgcccaagcagggcatcttgaagggcgacgtgagcatgtacctgctgctgaaggacggtggccgcttgcgctgccagttcgacaccgtgtacaaggccaagtccgtgccccgcaagatgcccgactggcacttcatccagcacaagctgacccgcgaggaccgcagcgacgccaagaaccagaagtggcacctgaccgagcacgccatcgcctccggctccgccttgccctccggactcagatctcgatagggtaccaatggccagttaacagatccagctgctgctgttctagggttcacaagtctgcctatttgtcttccccaatggagctatggttgtctggtctggtccttggtcgtgtcccgtttcattgtgtactatttacctgtaatgtgtatccttaagtctggtttgatggtgtctgaaacgttttgctgtggtagagcagcatggaagaactataatgaataagtgatccctaatcattgtgtccaaattttgcttctgctatacccttttgtgctgtttcttatgttttgcttaaaaatttgatctgacaaacaaatttgtctaaattatgctcttgttctgactgtgtactgtacacatttgtattgctaccggtttggcacatagttttctctttgattgcagatcaaacccttctgattgcagattgcttggctatggctgatgtgctcactgttcttctttagcttgtatattgctgatggtggcttggctacggctgaaaaagttgctgctgcgccgacttggcaactgttgctccagtaatgctttgtcctctcttcctagccgccgacttggcacttggcagctgttgctcctgtaatgcgttgttatctcttatctcttgagatgtactatgattttgaggctgtttgacttgtgccagattgccagtgctgatgctatattatctcaggtttttatgctagtatatgttttactgtgtgctgcctgtgtcgagttacgtaatctattgaaccgctatgcgtgttgatgccctgttgttgcttgccagattgatgcccctgttgcttgcagcttgcaagctgtagtgaaatcctaaaattcgaaaccaaatctattctgaacttttgaagatctgtgatgtccggaagaaaagattcaaacagataaacgggactctccagaatctataaaataaatgatcgacaaacgctttgctttggtaggcttcctagttagttagcggaccgaagcttcggtccgggcctagaaggccagcttcggccgccccatttcaaatatttttttcaaaataaaagaatgtagtatatagcaattgcttttctgtagtttataacttcgtatagcatacattatacgaagttatacttttctaatatatgaccaaaatttgttgatgtgcaggtcttcgcctaccccggcggcgcgtccatggagatccaccaggcactcacccgctcccccgtcatcgccaaccacctcttccgccacgagcaaggggaggcctttgccgcctccggctacgcgcgctcctcgggccgcgtcggcgtctgcatcgccacctccggccccggcgccaccaacctagtctccgcgctcgccgacgcgctgctcgattccgtccccatggtcgccatcacgggacaggtggcgcgacgcatgattggcaccgacgccttccaggagacgcccatcgtcgaggtcacccgctccatcaccaagcacaactacctggtcctcgacgtcgacgacatcccccgcgtcgtgcaggaggctttcttcctcgcctcctctggtcgaccagggccggtgcttgtcgacatccccaaggacatccagcagcagatggcggtgcctgtctgggacaagcccatgagtctgcctgggtacattgcgcgccttcccaagccccctgcgactgagttgcttgagcaggtgctgcgtcttgttggtgaatcgcggcgccctgttctttatgtgggcggtggctgcgcagcatctggtgaggagttgcgacgctttgtggagctgactggaatcccggtcacaactactcttatgggcctcggcaacttccccagcgacgacccactgtctctgcgcatgctaggtatgcatgggacggtgtatgcaaattatgcagtggataaggccgatctgttgcttgcacttggtgtgcggtttgatgatcgcgtgacagggaagattgaggcttttgcaagcagggctaagattgtgcacgttgatattgatccggctgagattggcaagaacaagcagccacatgtgtccatctgtgcagatgttaagcttgctttgcagggcatgaatgctcttcttgaaggaagcacatcaaagaagagctttgactttggctcatggaacgatgagttggatcagcagaagagggaattcccccttgggtataaaacatctaatgaggagatccagccacaatatgctattcaggttcttgatgagctgacgaaaggcgaggccatcatcggcacaggtgttgggcagcaccagatgtgggcggcacagtactacacttacaagcggccaaggcagtggttgtcttcagctggtcttggggctatgggatttggtttgccggctgctgctggtgcttctgtggcaaacccaggtgtcactgttgttgacatcgatggagatggtagctttctcatgaacgttcaggagctagctatgatccgaattgagaacctcccagtgaaggtctttgtgctaaacaaccagcacctggggatggtggtgcagttggaggacaggttctataaggccaacagagcgcacacatacttgggaaacccagagaatgaaagtgagatatatccagatttcgtgacgatcgccaaagggttcaacattccagcggtccgtgtgacaaagaagaacgaagtccgcgcagcgataaagaagatgctcgagactccagggccgtacctcttggatataatcgtcccacaccaggagcatgtgttgcctatgatccctagtggtggggctttcaaggatatgatcctggatggtgatggcaggactgtgtactgatgactagctagtcagttaacagatctgccagatcctcggtgtacaaataacccgtcttatcctatgagacgggccggcgtcagtgtgttctggaggaatttttatgtcagagcctttttctttgtgtgcttgatgtagatgccaagggaagcttattggctgttgaagcttgatgcaaaataaattatggaactctgttttttgtttatctaataataactagcaaatatgcttccattgcattgaaactaacagccttttgtgtttccaagttttattttgtgacaatgtcatctatttcaattagttgtggaatcggaaacttgcaggactaacttggaaactccaatccctcagcatcctggactttttcctggtgtaatccatgtagatattattttaatcatcattttagttctggaggtttttccatctccggttttgctcccctttcttcaaaaaaaaaaaaaaaatgccgtaggcgccgcaacgcccacctgttgttcaaactcatgggcacgagtggctcgaagattttatacaacaattgctgtagtttcaccgttgctggtgaagaagcatttttttaaaaaaatatagtggtattcattttaattagtttagttgtgcagcgagcaaaatttggacatgctctgctcggaatctgatcgacctagacacagattagcagcagtagctttgtcatctgttccaagagttgcgatctgatagaagaaaaaaaaaccttcccttcaatgtaaaaccgaaactaacaagaaagaagcacagtgccgtttaggcaagtatggagtacgtattaagcatgtagaaggccatgcatgaaccactaacaagaaagaagcgcagtgccattcaggcaagcataagcatgtagattggcatgcatgaacaactaacagtagatcgtctctggtctgattagaagttttttgggaagccaagaaatcatgtacaactggttccatctcaaattccgtggcaaaaagaggcctaagcaacataaagctttccactggttgccatatatgatttgggcatttcactttgatcttaatgggccttgtaaagcccaagactcatgattatctttagttgatgctcttaattaggtgtgggcaaataattcaaactgtatgtacccgaccaaaaccaaagcaaaaataatcgaaccaaaccgaaaatttaaaaataaccgaatgaaaactaaatcctataactgaaagaactgaaaccgaatcaaaatatttaatgtaaccaaaaatatccgaaatataattatattgtcaaaaatattaataatttctagattaaataattaaaaatacttaaaaatttatataaaatagtaaaaatactcgaaaataaccacaaatattcaaaaacaaccgaaatatcccaaaatattcaaagcaaaataaccgaatggataccaaattttaaaaccgaaaaaactggaacaaaaccaaaatcgaaccaaaatttcaaaaatcgaataaatactaaactttagaacaaaaaaaaacgataaccgaatgtatacgaaccaaagccgaattagataaccgaacgtccaggactactcttaatctttccgccacttatgatttgggctattactttgtttataatgagccttttcaagctcaagttcatgattgtccgtgagatgagaaactgacttgttggattcgaaaccctagctagtattggttaatacttaatacataaatgacctgcattgacatcatcatccaagaaaataaaaattgtatgcttgagatatttagttttcctagctaggttttctttattttagtaccgaatctttaggtgtgccacgttaatttagacccattttttcatacttaccaactgagtctagtttaatcatgactataatcgtataaaatgattcagtcgacgtcattgcgaacgtatataaaatcatccaaattgacgtcattccaaagaggtaagcatgcttatctaagagtccgagcatactaaacaagacgacattttatttgcactccaaatcaaattttgtattgcctaaagaaaaacaatcaaactcaagtttcttaaaattaatttcattcaaactaatcactttcaatatctcacatattattcatgccatttctatttgtctaaacatgatttaaaaaaaaaagtaaaatacaaagattactatgcaaaaactctataaaaaaaaattcaaatttcttatttatttgtgacatcaaattttcaaaataatttttttaattatcggttgatccggtcagtcgataaaaacataaactttcagcgaccgttaaaactttcctactaccgatttagagaaaatcttagcttgaaacgtaattgtaacctgccttcatgcaagtcgcaagatatgtcatcctaagttgtatatgttttctcaaaagatgtatttacttgagaaaatacgtttcaacgttgatggacaaccaattaagaatcaagcacctttcgtaatcaatttaggcttatcgtctaaggtatactgatttacgacagttgactagacttataaggaacaaaataatagaatagtttctaaacacttcacctaatcatagagactaagatggtaattcgtaaacgacaaagcctagtgacactgtccattgtaaaattccacatcatattagtattaaacatatacatgtagtttcctgaacacatgtagtatcaaacacacttcgtggcttcttcctcgaaacctgcggccgctcattaattaagtcatctagttgaaggatcgctatcaactttgtatagaaaagttgggccgaattcgagctcggtacggccagaatggcccggaccgaagcttatcttgcaagagcatccggccggatattgctttgcaaagatttgctagctagcagcacatgagatcgagttatgatctccaggtgtactcatgctctccttatgtttggatatactgatcttggatatctatagaagatccccaggtacaagatcaatgacatacttctgcacacttcgtgggattgtacagaatgatatactacatactgaaggtatgtggtggtcatgattttatatcattgaccttattatctataaagataatattacttggtgttgtttagatgaaaaacaagttacaaactaagtctctaccttacttcacattttaaatgtgtttgagagcaggtatgggatgacttagtaatttgcaaagatcagggggagtttcctcttgatcgaaagaacttgtttatacatcatggtgtactcttttctttgcatgagttttcccctgtttgggtttctcattcaaagtttttaacgaggcaacatcaacataaggcctatgtcgtatcatctatttttcccgtagaggttttcgaggatgatacattatggcatagttattgttgtatttgaactaggtgataagtttatctccctagagttcaaatgaatcaacaatagagtatgactactctccttatttctcccactgggtttttaaggagactcagctaatatgttgatttctcagattttctggcaagattatcttggagaaatattagcctgagttatatgtctcatcatttattttccccactggggtttttgagatgatgactatagacatgttattgttctttggtctagaggtccattggagaacaatatcgtaccatggttcaattgaaccaccgacaattatctataaggataattgagcttgtgttgttcagatggaaacaggttatatgaggagcaacatattgctcctaaattgttttatccccatgaacttcaggaaaatgaagatataaacatcttgcaaacaaagtcttgtgataatcttgctgatctattcacaaaatctctaccatactcaacgttttcagaaatgtgttgaggtgattggtatgagaagactcaagtgtttgcaagatcagggggagtaattctccgtgatatttgacctgttttataccatcatattacactcttttctttgtatgagttttgccttgttaaggttttctcatccaaagtttttaacgaggtaatatcaactaagctatatgcttcatcattcactttttcccacaggggtttttatgcatgatgattacaagcatattcttttggagttcaatatgagttttactcataatccaaaagacattgtgtactccttatttttcccacagggtttttgaggagatgatatattggaagacaacttgcagatgatctagtggacttggattgatcaagggggagtgttacaaaatattgtcatgtgatcaaccctctcccctgacagttttctttcaagggacacaccccttgggagacactgtatccacatgtatataaaccagattatctgcaataaagatctacaactgtcatttgtctctctctcaatctcgttactactgagtatactataacaggttcgaccaaaaatagcaaatggtggtctggcttctcgtcatgcatggttttacacgtgtacaggcgagaaagctcatcttaacaaatttaataacccaaatatatatgcatagaaatacccgaccatttgtttgttgagctagcgtgtggctcgcctttggcctcgcctgacctcaccttatatttctaataataccacgtctccctccttatatttaccctcttctcccaagagaaaaatcgggctccaatgcaaacaccagttttctaccctaaacacaagaacccagatgcataataaaaggtgaaagctagcagaagaggtacctaactctaccctactatagagaaaaagtcagcacattgcaagcaataataggatccatggaaagccatcgcatgcgtgtaggtgctcttgcatggagttcttcgttgctttcttctggaagccgtgacaagagcatcctccaccatgatatccgtgctcaagaagatcatgttagcaagcttaccgggcataaatctgaggtttgtggactcaagtggtcttatgacaatcgtcagcttgcatcgggtggcaatgacaacagacttttcgtttggaatccacattcagtacagccagtactgaagtatactgagcacacagcagctgtcaaagctattgcctggtcacctcatctccatgggctgcttgcatctggtggaggaactgcagatagatgcatacgattttggaatacgaccacaaatgcacacttgagctgtgtggacactggcagccaggtctgcaatcttgcgtggtcaaagaatgtaaatgagcttgttagcacccacggctactctcagaaccaaataattgtttggagatatccaacaatgtcgaagcttgccactttgacagggcatacatacagagtattgtacttagctatttcccctgatggccagaccatagttactggtgctggtgatgaaacgctccggttttggaacgtgttcccctctccaaagtcccagagttctgacagtttaagttgcgtcggaggaacatctttcgttagaagctacatccggtgaatttaaatgcccgggcgatcgctcgaggcgtacctagtggtaccacatggttaacctagacttgtccatcttctggattggccaacttaattaatgtatgaaataaaaggatgcacacatagtgacatgctaatcactataatgtgggcatcaaagttgtgtgttatgtgtaattactagttatctgaataaaagagaaagagatcatccatatttcttatcctaaatgaatgtcacgtgtctttataattctttgatgaaccagatgcatttcattaaccaaatccatatacatataaatattaatcatatataattaatatcaattgggttagcaaaacaaatctagtctaggtgtgttttgcgaatgcggccgccaccgcggtggagctcgaattccggtccgggcctagaaggccagcttcaagtttgtacaaaaaagcaggctccggccagaatggcccggaccgggttaccgaattcgagctcggtaccctgggatccgatatcgatgggccctggccgaagcttggtcacccggtccgggcctagaaggccgatctcccgggcacccagctttcttgtacaaagtggccgttaacggatcggccagaatggcccggaccgaagcttgcatgcctgcagtgcagcgtgacccggtcgtgcccctctctagagataatgagcattgcatgtctaagttataaaaaattaccacatattttttttgtcacacttgtttgaagtgcagtttatctatctttatacatatatttaaactttactctacgaataatataatctatagtactacaataatatcagtgttttagagaatcatataaatgaacagttagacatggtctaaaggacaattgagtattttgacaacaggactctacagttttatctttttagtgtgcatgtgttctcctttttttttgcaaatagcttcacctatataatacttcatccattttattagtacatccatttagggtttagggttaatggtttttatagactaatttttttagtacatctattttattctattttagcctctaaattaagaaaactaaaactctattttagtttttttatttaataatttagatataaaatagaataaaataaagtgactaaaaattaaacaaataccctttaagaaattaaaaaaactaaggaaacatttttcttgtttcgagtagataatgccagcctgttaaacgccgtcgacgagtctaacggacaccaaccagcgaaccagcagcgtcgcgtcgggccaagcgaagcagacggcacggcatctctgtcgctgcctctggacccctctcgagagttccgctccaccgttggacttgctccgctgtcggcatccagaaattgcgtggcggagcggcagacgtgagccggcacggcaggcggcctcctcctcctctcacggcaccggcagctacgggggattcctttcccaccgctccttcgctttcccttcctcgcccgccgtaataaatagacaccccctccacaccctctttccccaacctcgtgttgttcggagcgcacacacacacaaccagatctcccccaaatccacccgtcggcacctccgcttcaaggtacgccgctcgtcctcccccccccccctctctaccttctctagatcggcgttccggtccatgcatggttagggcccggtagttctacttctgttcatgtttgtgttagatccgtgtttgtgttagatccgtgctgctagcgttcgtacacggatgcgacctgtacgtcagacacgttctgattgctaacttgccagtgtttctctttggggaatcctgggatggctctagccgttccgcagacgggatcgatttcatgattttttttgtttcgttgcatagggtttggtttgcccttttcctttatttcaatatatgccgtgcacttgtttgtcgggtcatcttttcatgcttttttttgtcttggttgtgatgatgtggtctggttgggcggtcgttctagatcggagtagaattctgtttcaaactacctggtggatttattaattttggatctgtatgtgtgtgccatacatattcatagttacgaattgaagatgatggatggaaatatcgatctaggataggtatacatgttgatgcgggttttactgatgcatatacagagatgctttttgttcgcttggttgtgatgatgtggtgtggttgggcggtcgttcattcgttctagatcggagtagaatactgtttcaaactacctggtgtatttattaattttggaactgtatgtgtgtgtcatacatcttcatagttacgagtttaagatggatggaaatatcgatctaggataggtatacatgttgatgtgggttttactgatgcatatacatgatggcatatgcagcatctattcatatgctctaaccttgagtacctatctattataataaacaagtatgttttataattattttgatcttgatatacttggatgatggcatatgcagcagctatatgtggatttttttagccctgccttcatacgctatttatttgcttggtactgtttcttttgtcgatgctcaccctgttgtttggtgttacttctgcaggtcgactttaacttagcctaggatccatggcctcctccgagaacgtcatcaccgagttcatgcgcttcaaggtgcgcatggagggcaccgtgaacggccacgagttcgagatcgagggcgagggcgagggccgcccctacgagggccacaacaccgtgaagctgaaggtgaccaagggcggccccctgcccttcgcctgggacatcctgtccccccagttccagtacggctccaaggtgtacgtgaagcaccccgccgacatccccgactacaagaagctgtccttccccgagggcttcaagtgggagcgcgtgatgaacttcgaggacggcggcgtggcgaccgtgacccaggactcctccctgcaggacggctgcttcatctacaaggtgaagttcatcggcgtgaacttcccctccgacggccccgtgatgcagaagaagaccatgggctgggaggcctccaccgagcgcctgtacccccgcgacggcgtgctgaagggcgagacccacaaggccctgaagctgaaggacggcggccactacctggtggagttcaagtccatctacatggccaagaagcccgtgcagctgcccggctactactacgtggacgccaagctggacatcacctcccacaacgaggactacaccatcgtggagcagtacgagcgcaccgagggccgccaccacctgttcctgtagggtaccacatggttaacctagacttgtccatcttctggattggccaacttaattaatgtatgaaataaaaggatgcacacatagtgacatgctaatcactataatgtgggcatcaaagttgtgtgttatgtgtaattactagttatctgaataaaagagaaagagatcatccatatttcttatcctaaatgaatgtcacgtgtctttataattctttgatgaaccagatgcatttcattaaccaaatccatatacatataaatattaatcatatataattaatatcaattgggttagcaaaacaaatctagtctaggtgtgttttgcgaatgcggccgccaccgcggtggagctcgaattccggtccgggcctagaaggccagcttcggccgccccgggcaactttattatacaaagttgatagatcctcatgtcttcatcgtaagcttaaacaggccagaatggcctctggattcagcggcctagaaggccgaagtacttggtcttcctagtcgagtagatcacattcaagcttggtcacccggtccgtcaatattctgattccgatgacttcgtaggttcctagctcaagccgctcgtgtccaagcgtcacttacgattagctaatgattacggcatctaggaccgactagtggcgcgccgactagctagctaaggtaccgagctcgaattcattccgattaatcgtggcctcttgctcttcaggatgaagagctatgtttaaacgtgcaagcgctactagacaattcagtacattaaaaacgtccgcaatgtgttattaagttgtctaagcgtcaatttgtttacaccacaatatatcctgcca

SEQ ID NO: 51 - DNA, 29028 bp, Artificial Sequence
  RX000020
gtttacccgccaatatatcctgtcaaacactgatagtttaaactgaaggcgggaaacgacaatctgatcatgagcggagaattaagggagtcacgttatgacccccgccgatgacgcgggacaagccgttttacgtttggaactgacagaaccgcaacgttgaaggagccactcagcaagctggtacgattgtaatacgactcactatagggcgaattgagcgctgtttaaacgctcttcaactggaagagcggttacgctgtttaaacgctcttcaactggaagagcggttactaccggttcactagctagctgctaatcgagctagttaccctatgaggtgacatgaagcgctcacggttactatgacggttagcttcacgactgttggtggcagtagcgtacgacttagctatagttccggacttacccttaagcgatttaaatctgcggttaccgaattcgagctcggtaccctgggatctgcccttactttaacgcctctaaccaacacccctttatctttataaggaacaataaacagaatttgccccactgttctaaatcacctaataatatccccagctaaaaacaataaaggtttcctagaattaagacaagcatgactgttcctccaggagggtttggaacattgttgcagtcttgcagatacgggcgaagggtgagaaacagagcggagggctggaggtgacctcggtagtcgacgccggagttgagcttgacaacgacggggcggcccctgatggacttgaggaagtccgatggcgtcttcaccgtcccgccggcgcccgaggcgggcctgtcgctgccgccgccgccgctgctcatcttgcgcgctgtgcccccggcggtgtccctgtgttgcggatcgcgggtgggccaggtggatgcgagggcgacccgtttggactccggccggagccgccggatccctggtcggtgtcagtgccgtttactctgggccccacgtgtcagtaccgtctgtagatgacaacaacccgtcgtccacagtcatgtccaaaatatcctttcttcttttttttcgattcggatatctatcttccttttttttttccaaaaatcttcttgacgcaccagcgcgcacgtttgtggtaaacgccgacacgtcggtcccacgtcgatagaccccacccaccagtgagtagcgtgtacgtattcgggggtgacggacgtgtcgccgtcgtcttgctagtcccattcccatctgagccacacatctctgaacaaaaaaaaggagggaggcctccacgcacatccccctccgtgccacccgccccaaaccctcgcgccgcctccgagacagccgccgcaaccatggccaccgccgccgccgcgtctaccgcgctcactggcgccactaccgctgcgcccaaggcgaggcgccgggcgcacctcctggccacccgccgcgccctcgccgcgcccatcaggtgctcagcggcgtcacccgccatgccgatggctcccccggccaccccgctccggccgtggggccccaccgagccccgcaagggtgctgacatcctcgtcgagtccctcgagcgctgcggcgtccgcgacgtaagtttctgcttctacctttgatatatatataataattatcattaattagtagtaatataatatttcaaatatttttttcaaaataaaagaatgtagtatatagcaattgcttttctgtagtttataacttcgtatagcatacattatacgaagttatacttttctaatatatgaccaaaatttgttaccgaattcaggcgacccatcgctgctttgtctacatcatgttcttcatcatcctccccaggcgacgcgtgctgctgttcttattcagactaccgttcgagtgactgcatggcgtacatctttctgcatcgactttgtacggctacatcgaacatatacacgagatgtctcgtgtgaatagagtcactaatgccttaagcatcggttactccgtagggtacattctgttcttcttatttgtgcatatttttattgttgtttactgattatacgagtagttatacatacatgcacatacatatcatcacatatatcacaatatttttctaaattaaattaaaactaaaaatgactaaatttctaacaccaacgacattgtaatgttttctccaacaactttacctattctacattgttctatttcgaatttcactctataaacaacatagtctacaatggaaaacagtgctttgtacgactatatacgcgatgtgtggctacaacataagacaatatagtcgtttgaagattgaacctatatatcggtacggttaatccgtctatgtacgtgggcatgacgaacacccgtgataacgaaggattaacgtgcacaatcataaatccaaagtaggagcggtgcatgatgagaatcgctctcagtactcgacataatgaaccttacgaggtacaacaggcaggcaggcagggaccaggggccgcctttatttcaggctcgctggccccacgggcgtgctgcgtgcacgaagggcactaccccaacctctcaccgaaaaccgcgctggatcggcaaatcaaacgaggtggtgccccgtgcccactctccacgtccacggcaccatccctctgcagccgctcaccagccatgccgtgtcgcggaacggcacaaccacccccaacccactcacgaaaccccgtcccggccgtgcccgtgtcggtccgcgctcggcaacgaggcggcccgcgctgctgagtcccctggacacccgacaccctgtcggccctttgtttattcatcccgaaatctcatctgcccccacggccgactgcgctgcgccgcccggatatatatacccatcgttatcgatcgactggggactctatcagtgatagagtctagaggatcgctcaggaaggccgctgagatagaggcatggcggccaatgcgggcggcggtggagcgggaggaggcagcggcagcggcagcgtggctgcgccggcggtgtgccgccccagcggctcgcggtggacgccgacgccggagcagatcaggatgctgaaggagctctactacggctgcggcatccggtcgcccagctcggagcagatccagcgcatcaccgccatgctgcggcagcacggcaagatcgagggcaagaacgtcttctactggttccagaaccacaaggcccgcgagcgccagaagcgccgcctcaccagcctcgacgtcaacgtgcccgccgccggcgcggccgacgccaccaccagccaactcggcgtcctctcgctgtcgtcgccgccgccttcaggcgcggcgcctccctcgcccaccctcggcttctacgccgccggcaatggcggcggatcggctgtgctgctggacacgagttccgactggggcagcagcggcgctgccatggccaccgagacatgcttcctgcaggactacatgggcgtgacggacacgggcagctcgtcgcagtggccacgcttctcgtcgtcggacacgataatggcggcggccgcggcgcgggcggcgacgacgcgggcgcccgagacgctccctctcttcccgacctgcggcgacgacggcggcagcggtagcagcagctacttgccgttctggggtgccgcgtccacaactgccggcgccacttcttccgttgcgatccagcagcaacaccagctgcaggagcagtacagcttttacagcaacagcaacagcacccagctggccggcaccggcaaccaagacgtatcggcaacagcagcagcagccgccgccctggagctgagcctcagctcatggtgctccccttaccctgctgcagggagtatgtgagagcaacgcgagctgccactgctcttcactggtaccgttaacagatcattcgacaaagcagcattagtccgttgatcggtggaagaccactcgtcagtgttgagttgaatgtttgatcaataaaatacggcaatgctgtaagggttgttttttatgccattgataatacactgtactgttcagttgttgaactctatttcttagccatgccaagtgcttttcttattttgaataacattacagcaaaaagttgaaagacaaaaaaaaaaacccccgaacagagtgctttgggtcccaagcttctttagactgtgttcggcgttccccctaaatttctccccctatatctcactcacttgtcacatcagcgttctctttccccctatatctccacgctctacagcagttccacctatatcaaacctctataccccaccacaacaatattatatactttcatcttcaactaactcatgtaccttccaatttttttctactaataattatttacgtgcacagaaacttagcaaggagagagagagcggggtgacccaccttgctagttggatattacctcttctcttcaaagtatccttgaacgctcaccggttatcaaatctctacactatagctctgtagtcttgctagatagttagttctttagctctcggtgaccaagcttggcgcgatcaagcttatcgataccgtcgacctcgaagcttggtcacccggtccgggcctagaaggccagcttcaagtttgtacaaaaaagcaggctccggccagaatggcccggaccgggttaccgaattcttaccctagctccctgcggctgttacgcggtcccccatcaatcttctgttcttgcggttgtagcctgtgtaacagtgctagagtatgtatgataaataggttttaagtctgcttacatgacattttttattgtggaagagacatataaaaattagagagagtggttctcatgcaacggcggacggcccggtgctaaaagagcttcaagacaaaataatgaaacaggaagagagtagatttatctaagagccaactttattatatgaatgtgtttattgttggctttagatgatatggtaaggagttagagctaataatagataggctctattattattattattaattaaactcgctctaaggaggaaagtgggaggaagggacgaggacgaagactactggaagcatcgtgcatggatgatggatgtggtgtctcttaatgtaggtggccggaggatgtacgtgttaattgcgcgataagcactcagatccaaccgcaaactacctccacactgacacactgatagagagaaagagagacctccgacgactgccgccgcagatgagccacgtacgtatacgacgtctgccggccggctcaggctgccgccatcaccctgctcgaaagtcgcgttaggcggcgccagctacataggagtatctagtctagccagttagtatactactactgcgctgatgatgaattaactctgcatagatactgtacttgcctccctccaacacccaaccacctcctgctcggctcttaataacttggacacggatcgatgccatccaaggaagaacacgacgacgacgacggaacatccaccatgcaagcttgcatccatacgccgatacgcgtgcatccatccatccaccattatttccattttccaccgatcacacgtacacaggcctatttaaggagcgacatcccactgcaactctcctcaccactcatcaccagctagctctagcaaagcacttgccatctaccgaccgccgcattccaaacagcccgacgagctagcagagcggcaggcacctccctcctcaaggaacccatggccactgtgaacaactggctcgctttctccctctccccgcaggagctgccgccctcccagacgacggactccacactcatctcggccgccaccgccgaccatgtctccggcgatgtctgcttcaacatcccccaagattggagcatgaggggatcagagctttcggcgctcgtcgcggagccgaagctggaggacttcctcggcggcatctccttctccgagcagcatcacaaggccaactgcaacatgatacccagcactagcagcacagtttgctacgcgagctcaggtgctagcaccggctaccatcaccagctgtaccaccagcccaccagctcagcgctccacttcgcggactccgtaatggtggcttcctcggccggtgtccacgacggcggtgccatgctcagcgcggccgccgctaacggtgtcgctggcgctgccagtgccaacggcggcggcatcgggctgtccatgattaagaactggctgcggagccaaccggcgcccatgcagccgagggtggcggcggctgagggcgcgcaggggctctctttgtccatgaacatggcggggacgacccaaggcgctgctggcatgccacttctcgctggagagcgcgcacgggcgcccgagagtgtatcgacgtcagcacagggtggagccgtcgtcgtcacggcgccgaaggaggatagcggtggcagcggtgttgccggcgctctagtagccgtgagcacggacacgggtggcagcggcggcgcgtcggctgacaacacggcaaggaagacggtggacacgttcgggcagcgcacgtcgatttaccgtggcgtgacaaggcatagatggactgggagatatgaggcacatctttgggataacagttgcagaagggaagggcaaactcgtaagggtcgtcaagtctatttaggtggctatgataaagaggagaaagctgctagggcttatgatcttgctgctctgaagtactggggtgccacaacaacaacaaattttccagtgagtaactacgaaaaggagctcgaggacatgaagcacatgacaaggcaggagtttgtagcgtctctgagaaggaagagcagtggtttctccagaggtgcatccatttacaggggagtgactaggcatcaccaacatggaagatggcaagcacggattggacgagttgcagggaacaaggatctttacttgggcaccttcagcacccaggaggaggcagcggaggcgtacgacatcgcggcgatcaagttccgcggcctcaacgccgtcaccaacttcgacatgagccgctacgacgtgaagagcatcctggacagcagcgccctccccatcggcagcgccgccaagcgcctcaaggaggccgaggccgcagcgtccgcgcagcaccaccacgccggcgtggtgagctacgacgtcggccgcatcgcctcgcagctcggcgacggcggagccctggcggcggcgtacggcgcgcactaccacggcgccgcctggccgaccatcgcgttccagccgggcgccgccagcacaggcctgtaccacccgtacgcgcagcagccaatgcgcggcggcgggtggtgcaagcaggagcaggaccacgcggtgatcgcggccgcgcacagcctgcaggacctccaccacctgaacctgggcgcggccggcgcgcacgactttttctcggcagggcagcaggccgccgccgctgcgatgcacggcctgggtagcatcgacagtgcgtcgctcgagcacagcaccggctccaactccgtcgtctacaacggcggggtcggcgacagcaacggcgccagcgccgtcggcggcagtggcggtggctacatgatgccgatgagcgctgccggagcaaccactacatcggcaatggtgagccacgagcaggtgcatgcacgggcctacgacgaagccaagcaggctgctcagatggggtacgagagctacctggtgaacgcggagaacaatggtggcggaaggatgtctgcatgggggactgtcgtgtctgcagccgcggcggcagcagcaagcagcaacgacaacatggccgccgacgtcgggcatggcggcgcgcagctcttcagtgtctggaacgacacttaagcgtacctagtggtacctgacatcttatagtctgcaacctctcgtgtctgaattcctatctttatcaagtgttattgcttccacgactataggacagctttcgtcgaaagcttttgctcatgtgatctcgaaggattcatctagtctgatttttcgtgacttgtatcggttttattggattcatccaacatatatcaataaaaaatgagttgtgtttcctttcttcctagttcagttaaaattatttccctcctgcgcttgtgctgtaattgtctgtgtacctgttgtttgtgactgtgttagttcccttggatatgatttcgtatttgatatgtacatggagatagcttagcttcattattggagtatgaagttagtatgacatagtcactctcctggaaaattgacactgcaaaccatatttttattctgaaccacaaatcctagtcagtccgctggcatatgccgtccgtttgctgaatccagaacgtgggtttggagatgtacggctgagatgcctctatgcgaaggggatttcgtggtgaaacgagatgggagtagagcaacgcccgtggaagatgcttcaaacttccacacttttgagcaacgatcggcagtagtaaggtagacgatttcaagatcaaagcatatgaagataaacaacatcaacaacaaaatttgttggggttctatagagagaaacagagctacatacatacactgttttgtatctaccatctgagatgatgaaaagatgaaaaactaaagaatgccccggcgccaacgccaggacacgccgcgcgcgcgtcacccgagccatctcttgacccagccggcgctgtatatttacacacgttgcagcatcgatcaccacctgttcgatcgcgtcgccgtcaccgggatctgagtcgaaacctagacttgtccatcttctggattggccaacttaattaatgtatgaaataaaaggatgcacacatagtgacatgctaatcactataatgtgggcatcaaagttgtgtgttatgtgtaattactagttatctgaataaaagagaaagagatcatccatatttcttatcctaaatgaatgtcacgtgtctttataattctttgatgaaccagatgcatttcattaaccaaatccatatacatataaatattaatcatatataattaatatcaattgggttagcaaaacaaatctagtctaggtgtgttttgcgaatgcgaccttcttatgtgcttctagtctccaaatgtggttgatagttattttgctctaagatcaacagtaatgaagtataaatcatcgttgtggtgtgctactcggttaattgagcattaacacacacaaacatgacgaggatggtataatctccaaaaatgtgtactttgttaggtgggaccctatagccttgattaatgtgctatgttaggcatgcctggaaacgtgtgacgcatatgttttgtgaacctgttgatattatatgtgcttttatattaccatattttattaaaatactaatatttattactagtaagatataacattctatctagcttaaaaactaaccataaatattccataataactagatttaccaaactaatatactaaatatacataataaatacaaaattaacaagacaataatcaatatttatgagcttaatatatttagacattatggttggtcgacgataatcatgctaacttttcgtaattgcttgattgaaatatgcttagaataatgcctctttgttctacatggcaaatagggaccattatggtgtaacaccctgggaaccacaaacaccccgaaatgctactaaactacacaactaaccttcatatataaaatttcgacagcatctcctttgaaaatttgcatagacgtggaagcaacagagtataaacagatatcatgataagaaaacatactagacattaataatctgctagaaatgggaagaatcctaacttgacgactgcgtaactgactagagtcacacttagctgaccctagtcacttacaactgacttcgtgtcctagatcgatgggccctggccgaagcttggtcacccggtccgggcctagaaggccagcttcaagtttgtaccctggagcttgccgagtgccatccttggacactcgataaagtatattttattttttttattttgccaaccaaactttttgtggtatgttcctacactatgtagatctacatgtaccattttggcacaattacatatttacaaaaatgttttctataaatattagatttagttcgtttatttgaatttcttcggaaaattcacatttaaactgcaagtcactcgaaacatggaaaaccgtgcatgcaaaataaatgatatgcatgttatctagcacaagttacgaccgatttcagaagcagaccagaatcttcaagcaccatgctcactaaacatgaccgtgaacttgttatctagttgtttaaaaattgtataaaacacaaataaagtcagaaattaatgaaacttgtccacatgtcatgatatcatatatagaggttgtgataaaaatttgataatgtttcggtaaagttgtgacgtactatgtgtagaaacctaagtgacctacacataaaatcatagagtttcaatgtagttcactcgacaaagactttgtcaagtgtccgataaaaagtactcgacaaagaagccgttgtcgatgtactgttcgtcgagatctctttgtcgagtgtcacactaggcaaagtctttacggagtgtttttcaggctttgacactcggcaaagcgctcgattccagtagtgacagtaatttgcatcaaaaatagctgagagatttaggccccgtttcaatctcacgggataaagtttagcttcctgctaaactttagctatatgaattgaagtgctaaagtttagtttcaattaccaccattagctctcctgtttagattacaaatggctaaaagtagctaaaaaatagctgctaaagtttatctcgcgagattgaaacagggccttaaaatgagtcaactaatagaccaactaattattagctattagtcgttagcttctttaatctaagctaaaaccaactaatagcttatttgttgaattacaattagctcaacggaattctctgtttttctaaaaaaaaactgcccctctcttacagcaaattgtccgctgcccgtcgtccagatacaatgaacgtacctagtaggaactcttttacacgctcggtcgctcgccgcggatcggagtccccggaacacgacaccactgtggaacacgacaaagtctgctcagaggcggccacaccctggcgtgcaccgagccggagcccggataagcacggtaaggagagtacggcgggacgtggcgacccgtgtgtctgctgccacgcagccttcctccacgtagccgcgcggccgcgccacgtaccagggcccggcgctggtataaatgcgcgccacctccgctttagttctgcatacagccaacccaaggatgtccaacctgctcacggttcaccagaaccttccggctcttccagtggacgcgacgtccgatgaagtcaggaagaacctcatggacatgttccgcgacaggcaagcgttcagcgagcacacctggaagatgctgctctccgtctgccgctcctgggctgcatggtgcaagctgaacaacaggaagtggttccccgctgagcccgaggacgtgagggattaccttctgtacctgcaagcgcgaggtttgtttctgcttctacctttgatatatatataataattatcattaattagtagtaatataatatttcaaatatttttttcaaaataaaagaatgtagtatatagcaattgcttttctgtagtttataagtgtgtatattttaatttataacttttctaatatatgaccaaaacatggtgatgcctaggtctggcagtgaagaccatccagcaacaccttggacaactgaacatgcttcacaggcgctccggcctcccgcgccccagcgactcgaacgccgtgagcctcgtcatgcgccgcatcaggaaggaaaacgtcgatgccggcgaaagggcaaagcaggccctcgcgttcgagaggaccgatttcgaccaggtccgcagcctgatggagaacagcgacaggtgccaggacattaggaacctggcgttcctcggaattgcatacaacacgctcctcaggatcgcggaaattgcccgcattcgcgtgaaggacattagccgcaccgacggcggcaggatgcttatccacattggcaggaccaagacgctcgtttccaccgcaggcgtcgaaaaggccctcagcctcggagtgaccaagctcgtcgaacgctggatctccgtgtccggcgtcgcggacgacccaaacaactacctcttctgccgcgtccgcaagaacggggtggctgcccctagcgccaccagccaactcagcacgagggccttggaaggtattttcgaggccacccaccgcctgatctacggcgcgaaggatgacagcggtcaacgctacctcgcatggtccgggcactccgcccgcgttggagctgctagggacatggcccgcgccggtgtttccatccccgaaatcatgcaggcgggtggatggacgaacgtgaacattgtcatgaactacattcgcaaccttgacagcgagacgggcgcaatggttcgcctcctggaagatggtgactgagctagacccagctttcttgtacaaagtggccgttaacggatccagacttgtccatcttctggattggccaacttaattaatgtatgaaataaaaggatgcacacatagtgacatgctaatcactataatgtgggcatcaaagttgtgtgttatgtgtaattactagttatctgaataaaagagaaagagatcatccatatttcttatcctaaatgaatgtcacgtgtctttataattctttgatgaaccagatgcatttcattaaccaaatccatatacatataaatattaatcatatataattaatatcaattgggttagcaaaacaaatctagtctaggtgtgttttgcgaattgcggcaagctgttaccgaattcctgcccttaaggccaattgttcaagattcattcaacaattgaaacatctcccatgattaaatcagtataaggttgctatggtcttgcttgacaaagtttttttttgagggaatttcaactaaatttttgagtgaaactatcaaatactgattttaaaaaatttttataaaaggaagcgcagagataaaaggccatctatgctacaaaagtacccaaaaatgtaatcctaaagtatgaattgcattttttttttgtttggacgaaaggaaaggagtattaccacaagaatgatatcatcttcatatttagatcttttttgggtaaagcttgagattctctaaatatagagaaatcagaagaaaaaaaaaccgtgttttggtggttttgatttctagcctccacaataactttgacggcgtcgacaagtctaacggacaccaagcagcgaaccaccagcgccgagccaagcgaagcagacggccgagacgttgacaccttcggcgcggcatctctcgagagttccgctccggcgctccacctccaccgctggcggtttcttattccgttccgttccgcctcctgctctgctcctctccacaccacacggcacgaaaccgttacggcaccggcagcacccagcacgggagaggggattcctttcccaccgttccttccctttccgccccgccgctataaatagccagccccatccccagcttttttccccaatctcatctcctctctcctgttgttcggagcacacgcacaatccgatcgatccccaaatccccttcgtctctcctcgcgagcctcgtggatcccagcttcaaggtacggcgatcgatcatcccccctccttctctctaccttcttttctctagactacatcggatggcgatccatggttagggcctgctagtttcccttcctgttttgtcgatggctgcgaggcacaatagatctgatggcgttatgacggctaacttgtcatgttgttgcgatttatagtccctttaggagatcagtttaatttctcggatggttcgagatcggtggtccatggttagtaccctaagatccgcgctgttagggttcgtagatggaggcgacctgttctgattgttaacttgtcagtacctgggaaatcctgggatggttctagctcgtccgcagatgagatcgatttcatgatcctctgtatcttgtttcgttgcctaggttccgtctaatctatccgtggtatgatgtagatgttttgatcgtgctaactacgtcttgtaaagttaattgtcaggtcataatttttagcatgcctttttttttgtttggttttgtctaattgggctgtcgttctagatcagagtagaagactgttccaaactacctgctggatttattgaacttggatctgtatgtgtgtcacatatcttcataaattcatgattaagatggattgaaatatcttttatctttttggtatggatagttctatatgttggtgtggctttgttagatgtatacatgcttagatacatgaagcaacgtgctgctactgtttagtaattgctgttcatttgtctaataaacagataaggatatgtatttatgttgctgttggttttgctggtactttgttggatacaaatgcttcaatacagaaaacagcatgctgctacgatttaccatttatctaatcttatcatatgtctaatctaataaacaaacatgcttttaaattatcttcatatgcttggatgatggcatacacagcggctatgtgtggttttttaaatacccagcatcatgggcatgcatgacactgctttaatatgctttttatttgcttgagactgtttcttttgtttatactgaccctttagttcggtgactcttctgcaggtcgactttaacttagcctaggatccatggcccagtccaagcacggcctgaccaaggagatgaccatgaagtaccgcatggagggctgcgtggacggccacaagttcgtgatcaccggcgagggcatcggctaccccttcaagggcaagcaggccatcaacctgtgcgtggtggagggcggccccttgcccttcgccgaggacatcttgtccgccgccttcatgtacggcaaccgcgtgttcaccgagtacccccaggacatcgtcgactacttcaagaactcctgccccgccggctacacctgggaccgctccttcctgttcgaggacggcgccgtgtgcatctgcaacgccgacatcaccgtgagcgtggaggagaactgcatgtaccacgagtccaagttctacggcgtgaacttccccgccgacggccccgtgatgaagaagatgaccgacaactgggagccctcctgcgagaagatcatccccgtgcccaagcagggcatcttgaagggcgacgtgagcatgtacctgctgctgaaggacggtggccgcttgcgctgccagttcgacaccgtgtacaaggccaagtccgtgccccgcaagatgcccgactggcacttcatccagcacaagctgacccgcgaggaccgcagcgacgccaagaaccagaagtggcacctgaccgagcacgccatcgcctccggctccgccttgccctccggactcagatctcgatagggtaccaatggccagttaacagatccagctgctgctgttctagggttcacaagtctgcctatttgtcttccccaatggagctatggttgtctggtctggtccttggtcgtgtcccgtttcattgtgtactatttacctgtaatgtgtatccttaagtctggtttgatggtgtctgaaacgttttgctgtggtagagcagcatggaagaactataatgaataagtgatccctaatcattgtgtccaaattttgcttctgctatacccttttgtgctgtttcttatgttttgcttaaaaatttgatctgacaaacaaatttgtctaaattatgctcttgttctgactgtgtactgtacacatttgtattgctaccggtttggcacatagttttctctttgattgcagatcaaacccttctgattgcagattgcttggctatggctgatgtgctcactgttcttctttagcttgtatattgctgatggtggcttggctacggctgaaaaagttgctgctgcgccgacttggcaactgttgctccagtaatgctttgtcctctcttcctagccgccgacttggcacttggcagctgttgctcctgtaatgcgttgttatctcttatctcttgagatgtactatgattttgaggctgtttgacttgtgccagattgccagtgctgatgctatattatctcaggtttttatgctagtatatgttttactgtgtgctgcctgtgtcgagttacgtaatctattgaaccgctatgcgtgttgatgccctgttgttgcttgccagattgatgcccctgttgcttgcagcttgcaagctgtagtgaaatcctaaaattcgaaaccaaatctattctgaacttttgaagatctgtgatgtccggaagaaaagattcaaacagataaacgggactctccagaatctataaaataaatgatcgacaaacgctttgctttggtaggcttcctagttagttagcggaccgaagcttcggtccgggcctagaaggccagcttcggccgccccatttcaaatatttttttcaaaataaaagaatgtagtatatagcaattgcttttctgtagtttataacttcgtatagcatacattatacgaagttatacttttctaatatatgaccaaaatttgttgatgtgcaggtcttcgcctaccccggcggcgcgtccatggagatccaccaggcactcacccgctcccccgtcatcgccaaccacctcttccgccacgagcaaggggaggcctttgccgcctccggctacgcgcgctcctcgggccgcgtcggcgtctgcatcgccacctccggccccggcgccaccaacctagtctccgcgctcgccgacgcgctgctcgattccgtccccatggtcgccatcacgggacaggtggcgcgacgcatgattggcaccgacgccttccaggagacgcccatcgtcgaggtcacccgctccatcaccaagcacaactacctggtcctcgacgtcgacgacatcccccgcgtcgtgcaggaggctttcttcctcgcctcctctggtcgaccagggccggtgcttgtcgacatccccaaggacatccagcagcagatggcggtgcctgtctgggacaagcccatgagtctgcctgggtacattgcgcgccttcccaagccccctgcgactgagttgcttgagcaggtgctgcgtcttgttggtgaatcgcggcgccctgttctttatgtgggcggtggctgcgcagcatctggtgaggagttgcgacgctttgtggagctgactggaatcccggtcacaactactcttatgggcctcggcaacttccccagcgacgacccactgtctctgcgcatgctaggtatgcatgggacggtgtatgcaaattatgcagtggataaggccgatctgttgcttgcacttggtgtgcggtttgatgatcgcgtgacagggaagattgaggcttttgcaagcagggctaagattgtgcacgttgatattgatccggctgagattggcaagaacaagcagccacatgtgtccatctgtgcagatgttaagcttgctttgcagggcatgaatgctcttcttgaaggaagcacatcaaagaagagctttgactttggctcatggaacgatgagttggatcagcagaagagggaattcccccttgggtataaaacatctaatgaggagatccagccacaatatgctattcaggttcttgatgagctgacgaaaggcgaggccatcatcggcacaggtgttgggcagcaccagatgtgggcggcacagtactacacttacaagcggccaaggcagtggttgtcttcagctggtcttggggctatgggatttggtttgccggctgctgctggtgcttctgtggcaaacccaggtgtcactgttgttgacatcgatggagatggtagctttctcatgaacgttcaggagctagctatgatccgaattgagaacctcccagtgaaggtctttgtgctaaacaaccagcacctggggatggtggtgcagttggaggacaggttctataaggccaacagagcgcacacatacttgggaaacccagagaatgaaagtgagatatatccagatttcgtgacgatcgccaaagggttcaacattccagcggtccgtgtgacaaagaagaacgaagtccgcgcagcgataaagaagatgctcgagactccagggccgtacctcttggatataatcgtcccacaccaggagcatgtgttgcctatgatccctagtggtggggctttcaaggatatgatcctggatggtgatggcaggactgtgtactgatgactagctagtcagttaacagatctgccagatcctcggtgtacaaataacccgtcttatcctatgagacgggccggcgtcagtgtgttctggaggaatttttatgtcagagcctttttctttgtgtgcttgatgtagatgccaagggaagcttattggctgttgaagcttgatgcaaaataaattatggaactctgttttttgtttatctaataataactagcaaatatgcttccattgcattgaaactaacagccttttgtgtttccaagttttattttgtgacaatgtcatctatttcaattagttgtggaatcggaaacttgcaggactaacttggaaactccaatccctcagcatcctggactttttcctggtgtaatccatgtagatattattttaatcatcattttagttctggaggtttttccatctccggttttgctcccctttcttcaaaaaaaaaaaaaaaatgccgtaggcgccgcaacgcccacctgttgttcaaactcatgggcacgagtggctcgaagattttatacaacaattgctgtagtttcaccgttgctggtgaagaagcatttttttaaaaaaatatagtggtattcattttaattagtttagttgtgcagcgagcaaaatttggacatgctctgctcggaatctgatcgacctagacacagattagcagcagtagctttgtcatctgttccaagagttgcgatctgatagaagaaaaaaaaaccttcccttcaatgtaaaaccgaaactaacaagaaagaagcacagtgccgtttaggcaagtatggagtacgtattaagcatgtagaaggccatgcatgaaccactaacaagaaagaagcgcagtgccattcaggcaagcataagcatgtagattggcatgcatgaacaactaacagtagatcgtctctggtctgattagaagttttttgggaagccaagaaatcatgtacaactggttccatctcaaattccgtggcaaaaagaggcctaagcaacataaagctttccactggttgccatatatgatttgggcatttcactttgatcttaatgggccttgtaaagcccaagactcatgattatctttagttgatgctcttaattaggtgtgggcaaataattcaaactgtatgtacccgaccaaaaccaaagcaaaaataatcgaaccaaaccgaaaatttaaaaataaccgaatgaaaactaaatcctataactgaaagaactgaaaccgaatcaaaatatttaatgtaaccaaaaatatccgaaatataattatattgtcaaaaatattaataatttctagattaaataattaaaaatacttaaaaatttatataaaatagtaaaaatactcgaaaataaccacaaatattcaaaaacaaccgaaatatcccaaaatattcaaagcaaaataaccgaatggataccaaattttaaaaccgaaaaaactggaacaaaaccaaaatcgaaccaaaatttcaaaaatcgaataaatactaaactttagaacaaaaaaaaacgataaccgaatgtatacgaaccaaagccgaattagataaccgaacgtccaggactactcttaatctttccgccacttatgatttgggctattactttgtttataatgagccttttcaagctcaagttcatgattgtccgtgagatgagaaactgacttgttggattcgaaaccctagctagtattggttaatacttaatacataaatgacctgcattgacatcatcatccaagaaaataaaaattgtatgcttgagatatttagttttcctagctaggttttctttattttagtaccgaatctttaggtgtgccacgttaatttagacccattttttcatacttaccaactgagtctagtttaatcatgactataatcgtataaaatgattcagtcgacgtcattgcgaacgtatataaaatcatccaaattgacgtcattccaaagaggtaagcatgcttatctaagagtccgagcatactaaacaagacgacattttatttgcactccaaatcaaattttgtattgcctaaagaaaaacaatcaaactcaagtttcttaaaattaatttcattcaaactaatcactttcaatatctcacatattattcatgccatttctatttgtctaaacatgatttaaaaaaaaaagtaaaatacaaagattactatgcaaaaactctataaaaaaaaattcaaatttcttatttatttgtgacatcaaattttcaaaataatttttttaattatcggttgatccggtcagtcgataaaaacataaactttcagcgaccgttaaaactttcctactaccgatttagagaaaatcttagcttgaaacgtaattgtaacctgccttcatgcaagtcgcaagatatgtcatcctaagttgtatatgttttctcaaaagatgtatttacttgagaaaatacgtttcaacgttgatggacaaccaattaagaatcaagcacctttcgtaatcaatttaggcttatcgtctaaggtatactgatttacgacagttgactagacttataaggaacaaaataatagaatagtttctaaacacttcacctaatcatagagactaagatggtaattcgtaaacgacaaagcctagtgacactgtccattgtaaaattccacatcatattagtattaaacatatacatgtagtttcctgaacacatgtagtatcaaacacacttcgtggcttcttcctcgaaacctgcggccgctcattaattaagtcatctagttgaaggatcgctatcaactttgtatagaaaagttgggccgaattcgagctcggtacggccagaatggcccggaccgaagcttatcttgcaagagcatccggccggatattgctttgcaaagatttgctagctagcagcacatgagatcgagttatgatctccaggtgtactcatgctctccttatgtttggatatactgatcttggatatctatagaagatccccaggtacaagatcaatgacatacttctgcacacttcgtgggattgtacagaatgatatactacatactgaaggtatgtggtggtcatgattttatatcattgaccttattatctataaagataatattacttggtgttgtttagatgaaaaacaagttacaaactaagtctctaccttacttcacattttaaatgtgtttgagagcaggtatgggatgacttagtaatttgcaaagatcagggggagtttcctcttgatcgaaagaacttgtttatacatcatggtgtactcttttctttgcatgagttttcccctgtttgggtttctcattcaaagtttttaacgaggcaacatcaacataaggcctatgtcgtatcatctatttttcccgtagaggttttcgaggatgatacattatggcatagttattgttgtatttgaactaggtgataagtttatctccctagagttcaaatgaatcaacaatagagtatgactactctccttatttctcccactgggtttttaaggagactcagctaatatgttgatttctcagattttctggcaagattatcttggagaaatattagcctgagttatatgtctcatcatttattttccccactggggtttttgagatgatgactatagacatgttattgttctttggtctagaggtccattggagaacaatatcgtaccatggttcaattgaaccaccgacaattatctataaggataattgagcttgtgttgttcagatggaaacaggttatatgaggagcaacatattgctcctaaattgttttatccccatgaacttcaggaaaatgaagatataaacatcttgcaaacaaagtcttgtgataatcttgctgatctattcacaaaatctctaccatactcaacgttttcagaaatgtgttgaggtgattggtatgagaagactcaagtgtttgcaagatcagggggagtaattctccgtgatatttgacctgttttataccatcatattacactcttttctttgtatgagttttgccttgttaaggttttctcatccaaagtttttaacgaggtaatatcaactaagctatatgcttcatcattcactttttcccacaggggtttttatgcatgatgattacaagcatattcttttggagttcaatatgagttttactcataatccaaaagacattgtgtactccttatttttcccacagggtttttgaggagatgatatattggaagacaacttgcagatgatctagtggacttggattgatcaagggggagtgttacaaaatattgtcatgtgatcaaccctctcccctgacagttttctttcaagggacacaccccttgggagacactgtatccacatgtatataaaccagattatctgcaataaagatctacaactgtcatttgtctctctctcaatctcgttactactgagtatactataacaggttcgaccaaaaatagcaaatggtggtctggcttctcgtcatgcatggttttacacgtgtacaggcgagaaagctcatcttaacaaatttaataacccaaatatatatgcatagaaatacccgaccatttgtttgttgagctagcgtgtggctcgcctttggcctcgcctgacctcaccttatatttctaataataccacgtctccctccttatatttaccctcttctcccaagagaaaaatcgggctccaatgcaaacaccagttttctaccctaaacacaagaacccagatgcataataaaaggtgaaagctagcagaagaggtacctaactctaccctactatagagaaaaagtcagcacattgcaagcaataataggatccatggcggtggcggcgccggcctcggacgccaagccgcgcctcaacgtgccaccgtccatggcatccgcgctccgcctcgatcccgtggggctgggggcgggaccctctatgccgtccccctcccgccgactcgccgagcctcccaagacgccctccccatccaagaccacctacagcgaccgtttcatcccctgccgctcctcctcccgcctccagaacttcgcgctaatcgactcccctctctccccagccaaggacgacacgccctactcccgcctcctccgcgccgagctctttggccccgattcacccaaacccaccaccgccacctccgcagcctccgcctcgcccaacaccaacctcttccgcttcaagaaagaccactccgctcccacctcacccttcgctaaagctgccgccgcgcaccatgactgcaccgcgggatccggagacgcgccgtcgccgcagaagccacccaggaaggtccccaaaacgccgcataaggtcctggacgcgccctccctgcaggacgacttctatctcaacctcgtcgactggtcctcgcagaacgtgctcgccgtcggcctcggcacctgcgtctacctctggtccgcgtccaatagcaaggtcaccaagctctgcgatttggggcctagggacagcgtatgcgccgtgcattggtcacgggaaggctcttatctttccattggcaccggccttggagatgtccagatttgggatagttctcgctgtaagcggattagaaatatgggaggtcaccaaacaaggactggggtattagcatggagctcatgcatcttgtcgtcgggtagcagggacaagaacatactgcagcatgacatccgtgtccccaatgactatatcagcaagttttctggtcatagatcagaggtttgtggactcgaatggtcgcatgacgaccgcgagcttgcctcaggcggaaatgacaaccagttattagtctggaaccaacgatcgcaacagccagttttgcggttgacagaacatacagctgctgttaaagcaatagcgtggtcaccacatcagcaaggactcctagcatcaggaggtggaacagctgatagatgcatcaggttttggaacacggctaacggaaatgttctgaactcaattgacacaggcagccaggtttgcaaccttgcctggtgcaaaaatgtgaatgagcttgtgagcacacatggatattcccaaaatcagatcatggtgtggaaatacccatccatgtcaaaggttgcaactctaactggacatacgatgcgtgtgctttacctcgcgtcgtcgcctgatggacagaccatagtaacaggggcaggtgacgaaactctacggttctggaacatatttccatcagttagaacacagactcctgtgcgtgatattgggctctcgtcattctcaagaagccacatccggtgaatttaaatgcccgggcgatcgctcgaggcgtacctagtggtaccacatggttaacctagacttgtccatcttctggattggccaacttaattaatgtatgaaataaaaggatgcacacatagtgacatgctaatcactataatgtgggcatcaaagttgtgtgttatgtgtaattactagttatctgaataaaagagaaagagatcatccatatttcttatcctaaatgaatgtcacgtgtctttataattctttgatgaaccagatgcatttcattaaccaaatccatatacatataaatattaatcatatataattaatatcaattgggttagcaaaacaaatctagtctaggtgtgttttgcgaatgcggccgccaccgcggtggagctcgaattccggtccgggcctagaaggccagcttcaagtttgtacaaaaaagcaggctccggccagaatggcccggaccgggttaccgaattcgagctcggtaccctgggatccgatatcgatgggccctggccgaagcttggtcacccggtccgggcctagaaggccgatctcccgggcacccagctttcttgtacaaagtggccgttaacggatcggccagaatggcccggaccgaagcttgcatgcctgcagtgcagcgtgacccggtcgtgcccctctctagagataatgagcattgcatgtctaagttataaaaaattaccacatattttttttgtcacacttgtttgaagtgcagtttatctatctttatacatatatttaaactttactctacgaataatataatctatagtactacaataatatcagtgttttagagaatcatataaatgaacagttagacatggtctaaaggacaattgagtattttgacaacaggactctacagttttatctttttagtgtgcatgtgttctcctttttttttgcaaatagcttcacctatataatacttcatccattttattagtacatccatttagggtttagggttaatggtttttatagactaatttttttagtacatctattttattctattttagcctctaaattaagaaaactaaaactctattttagtttttttatttaataatttagatataaaatagaataaaataaagtgactaaaaattaaacaaataccctttaagaaattaaaaaaactaaggaaacatttttcttgtttcgagtagataatgccagcctgttaaacgccgtcgacgagtctaacggacaccaaccagcgaaccagcagcgtcgcgtcgggccaagcgaagcagacggcacggcatctctgtcgctgcctctggacccctctcgagagttccgctccaccgttggacttgctccgctgtcggcatccagaaattgcgtggcggagcggcagacgtgagccggcacggcaggcggcctcctcctcctctcacggcaccggcagctacgggggattcctttcccaccgctccttcgctttcccttcctcgcccgccgtaataaatagacaccccctccacaccctctttccccaacctcgtgttgttcggagcgcacacacacacaaccagatctcccccaaatccacccgtcggcacctccgcttcaaggtacgccgctcgtcctcccccccccccctctctaccttctctagatcggcgttccggtccatgcatggttagggcccggtagttctacttctgttcatgtttgtgttagatccgtgtttgtgttagatccgtgctgctagcgttcgtacacggatgcgacctgtacgtcagacacgttctgattgctaacttgccagtgtttctctttggggaatcctgggatggctctagccgttccgcagacgggatcgatttcatgattttttttgtttcgttgcatagggtttggtttgcccttttcctttatttcaatatatgccgtgcacttgtttgtcgggtcatcttttcatgcttttttttgtcttggttgtgatgatgtggtctggttgggcggtcgttctagatcggagtagaattctgtttcaaactacctggtggatttattaattttggatctgtatgtgtgtgccatacatattcatagttacgaattgaagatgatggatggaaatatcgatctaggataggtatacatgttgatgcgggttttactgatgcatatacagagatgctttttgttcgcttggttgtgatgatgtggtgtggttgggcggtcgttcattcgttctagatcggagtagaatactgtttcaaactacctggtgtatttattaattttggaactgtatgtgtgtgtcatacatcttcatagttacgagtttaagatggatggaaatatcgatctaggataggtatacatgttgatgtgggttttactgatgcatatacatgatggcatatgcagcatctattcatatgctctaaccttgagtacctatctattataataaacaagtatgttttataattattttgatcttgatatacttggatgatggcatatgcagcagctatatgtggatttttttagccctgccttcatacgctatttatttgcttggtactgtttcttttgtcgatgctcaccctgttgtttggtgttacttctgcaggtcgactttaacttagcctaggatccatggcctcctccgagaacgtcatcaccgagttcatgcgcttcaaggtgcgcatggagggcaccgtgaacggccacgagttcgagatcgagggcgagggcgagggccgcccctacgagggccacaacaccgtgaagctgaaggtgaccaagggcggccccctgcccttcgcctgggacatcctgtccccccagttccagtacggctccaaggtgtacgtgaagcaccccgccgacatccccgactacaagaagctgtccttccccgagggcttcaagtgggagcgcgtgatgaacttcgaggacggcggcgtggcgaccgtgacccaggactcctccctgcaggacggctgcttcatctacaaggtgaagttcatcggcgtgaacttcccctccgacggccccgtgatgcagaagaagaccatgggctgggaggcctccaccgagcgcctgtacccccgcgacggcgtgctgaagggcgagacccacaaggccctgaagctgaaggacggcggccactacctggtggagttcaagtccatctacatggccaagaagcccgtgcagctgcccggctactactacgtggacgccaagctggacatcacctcccacaacgaggactacaccatcgtggagcagtacgagcgcaccgagggccgccaccacctgttcctgtagggtaccacatggttaacctagacttgtccatcttctggattggccaacttaattaatgtatgaaataaaaggatgcacacatagtgacatgctaatcactataatgtgggcatcaaagttgtgtgttatgtgtaattactagttatctgaataaaagagaaagagatcatccatatttcttatcctaaatgaatgtcacgtgtctttataattctttgatgaaccagatgcatttcattaaccaaatccatatacatataaatattaatcatatataattaatatcaattgggttagcaaaacaaatctagtctaggtgtgttttgcgaatgcggccgccaccgcggtggagctcgaattccggtccgggcctagaaggccagcttcggccgccccgggcaactttattatacaaagttgatagatcctcatgtcttcatcgtaagcttaaacaggccagaatggcctctggattcagcggcctagaaggccgaagtacttggtcttcctagtcgagtagatcacattcaagcttggtcacccggtccgtcaatattctgattccgatgacttcgtaggttcctagctcaagccgctcgtgtccaagcgtcacttacgattagctaatgattacggcatctaggaccgactagtggcgcgccgactagctagctaaggtaccgagctcgaattcattccgattaatcgtggcctcttgctcttcaggatgaagagctatgtttaaacgtgcaagcgctactagacaattcagtacattaaaaacgtccgcaatgtgttattaagttgtctaagcgtcaatttgtttacaccacaatatatcctgcca

SEQ ID NO: 52 - DNA, 28425 bp, Artificial Sequence
  RX000021
gtttacccgccaatatatcctgtcaaacactgatagtttaaactgaaggcgggaaacgacaatctgatcatgagcggagaattaagggagtcacgttatgacccccgccgatgacgcgggacaagccgttttacgtttggaactgacagaaccgcaacgttgaaggagccactcagcaagctggtacgattgtaatacgactcactatagggcgaattgagcgctgtttaaacgctcttcaactggaagagcggttacgctgtttaaacgctcttcaactggaagagcggttactaccggttcactagctagctgctaatcgagctagttaccctatgaggtgacatgaagcgctcacggttactatgacggttagcttcacgactgttggtggcagtagcgtacgacttagctatagttccggacttacccttaagcgatttaaatctgcggttaccgaattcgagctcggtaccctgggatctgcccttactttaacgcctctaaccaacacccctttatctttataaggaacaataaacagaatttgccccactgttctaaatcacctaataatatccccagctaaaaacaataaaggtttcctagaattaagacaagcatgactgttcctccaggagggtttggaacattgttgcagtcttgcagatacgggcgaagggtgagaaacagagcggagggctggaggtgacctcggtagtcgacgccggagttgagcttgacaacgacggggcggcccctgatggacttgaggaagtccgatggcgtcttcaccgtcccgccggcgcccgaggcgggcctgtcgctgccgccgccgccgctgctcatcttgcgcgctgtgcccccggcggtgtccctgtgttgcggatcgcgggtgggccaggtggatgcgagggcgacccgtttggactccggccggagccgccggatccctggtcggtgtcagtgccgtttactctgggccccacgtgtcagtaccgtctgtagatgacaacaacccgtcgtccacagtcatgtccaaaatatcctttcttcttttttttcgattcggatatctatcttccttttttttttccaaaaatcttcttgacgcaccagcgcgcacgtttgtggtaaacgccgacacgtcggtcccacgtcgatagaccccacccaccagtgagtagcgtgtacgtattcgggggtgacggacgtgtcgccgtcgtcttgctagtcccattcccatctgagccacacatctctgaacaaaaaaaaggagggaggcctccacgcacatccccctccgtgccacccgccccaaaccctcgcgccgcctccgagacagccgccgcaaccatggccaccgccgccgccgcgtctaccgcgctcactggcgccactaccgctgcgcccaaggcgaggcgccgggcgcacctcctggccacccgccgcgccctcgccgcgcccatcaggtgctcagcggcgtcacccgccatgccgatggctcccccggccaccccgctccggccgtggggccccaccgagccccgcaagggtgctgacatcctcgtcgagtccctcgagcgctgcggcgtccgcgacgtaagtttctgcttctacctttgatatatatataataattatcattaattagtagtaatataatatttcaaatatttttttcaaaataaaagaatgtagtatatagcaattgcttttctgtagtttataacttcgtatagcatacattatacgaagttatacttttctaatatatgaccaaaatttgttaccgaattcaggcgacccatcgctgctttgtctacatcatgttcttcatcatcctccccaggcgacgcgtgctgctgttcttattcagactaccgttcgagtgactgcatggcgtacatctttctgcatcgactttgtacggctacatcgaacatatacacgagatgtctcgtgtgaatagagtcactaatgccttaagcatcggttactccgtagggtacattctgttcttcttatttgtgcatatttttattgttgtttactgattatacgagtagttatacatacatgcacatacatatcatcacatatatcacaatatttttctaaattaaattaaaactaaaaatgactaaatttctaacaccaacgacattgtaatgttttctccaacaactttacctattctacattgttctatttcgaatttcactctataaacaacatagtctacaatggaaaacagtgctttgtacgactatatacgcgatgtgtggctacaacataagacaatatagtcgtttgaagattgaacctatatatcggtacggttaatccgtctatgtacgtgggcatgacgaacacccgtgataacgaaggattaacgtgcacaatcataaatccaaagtaggagcggtgcatgatgagaatcgctctcagtactcgacataatgaaccttacgaggtacaacaggcaggcaggcagggaccaggggccgcctttatttcaggctcgctggccccacgggcgtgctgcgtgcacgaagggcactaccccaacctctcaccgaaaaccgcgctggatcggcaaatcaaacgaggtggtgccccgtgcccactctccacgtccacggcaccatccctctgcagccgctcaccagccatgccgtgtcgcggaacggcacaaccacccccaacccactcacgaaaccccgtcccggccgtgcccgtgtcggtccgcgctcggcaacgaggcggcccgcgctgctgagtcccctggacacccgacaccctgtcggccctttgtttattcatcccgaaatctcatctgcccccacggccgactgcgctgcgccgcccggatatatatacccatcgttatcgatcgactggggactctatcagtgatagagtctagaggatcgctcaggaaggccgctgagatagaggcatggcggccaatgcgggcggcggtggagcgggaggaggcagcggcagcggcagcgtggctgcgccggcggtgtgccgccccagcggctcgcggtggacgccgacgccggagcagatcaggatgctgaaggagctctactacggctgcggcatccggtcgcccagctcggagcagatccagcgcatcaccgccatgctgcggcagcacggcaagatcgagggcaagaacgtcttctactggttccagaaccacaaggcccgcgagcgccagaagcgccgcctcaccagcctcgacgtcaacgtgcccgccgccggcgcggccgacgccaccaccagccaactcggcgtcctctcgctgtcgtcgccgccgccttcaggcgcggcgcctccctcgcccaccctcggcttctacgccgccggcaatggcggcggatcggctgtgctgctggacacgagttccgactggggcagcagcggcgctgccatggccaccgagacatgcttcctgcaggactacatgggcgtgacggacacgggcagctcgtcgcagtggccacgcttctcgtcgtcggacacgataatggcggcggccgcggcgcgggcggcgacgacgcgggcgcccgagacgctccctctcttcccgacctgcggcgacgacggcggcagcggtagcagcagctacttgccgttctggggtgccgcgtccacaactgccggcgccacttcttccgttgcgatccagcagcaacaccagctgcaggagcagtacagcttttacagcaacagcaacagcacccagctggccggcaccggcaaccaagacgtatcggcaacagcagcagcagccgccgccctggagctgagcctcagctcatggtgctccccttaccctgctgcagggagtatgtgagagcaacgcgagctgccactgctcttcactggtaccgttaacagatcattcgacaaagcagcattagtccgttgatcggtggaagaccactcgtcagtgttgagttgaatgtttgatcaataaaatacggcaatgctgtaagggttgttttttatgccattgataatacactgtactgttcagttgttgaactctatttcttagccatgccaagtgcttttcttattttgaataacattacagcaaaaagttgaaagacaaaaaaaaaaacccccgaacagagtgctttgggtcccaagcttctttagactgtgttcggcgttccccctaaatttctccccctatatctcactcacttgtcacatcagcgttctctttccccctatatctccacgctctacagcagttccacctatatcaaacctctataccccaccacaacaatattatatactttcatcttcaactaactcatgtaccttccaatttttttctactaataattatttacgtgcacagaaacttagcaaggagagagagagcggggtgacccaccttgctagttggatattacctcttctcttcaaagtatccttgaacgctcaccggttatcaaatctctacactatagctctgtagtcttgctagatagttagttctttagctctcggtgaccaagcttggcgcgatcaagcttatcgataccgtcgacctcgaagcttggtcacccggtccgggcctagaaggccagcttcaagtttgtacaaaaaagcaggctccggccagaatggcccggaccgggttaccgaattcttaccctagctccctgcggctgttacgcggtcccccatcaatcttctgttcttgcggttgtagcctgtgtaacagtgctagagtatgtatgataaataggttttaagtctgcttacatgacattttttattgtggaagagacatataaaaattagagagagtggttctcatgcaacggcggacggcccggtgctaaaagagcttcaagacaaaataatgaaacaggaagagagtagatttatctaagagccaactttattatatgaatgtgtttattgttggctttagatgatatggtaaggagttagagctaataatagataggctctattattattattattaattaaactcgctctaaggaggaaagtgggaggaagggacgaggacgaagactactggaagcatcgtgcatggatgatggatgtggtgtctcttaatgtaggtggccggaggatgtacgtgttaattgcgcgataagcactcagatccaaccgcaaactacctccacactgacacactgatagagagaaagagagacctccgacgactgccgccgcagatgagccacgtacgtatacgacgtctgccggccggctcaggctgccgccatcaccctgctcgaaagtcgcgttaggcggcgccagctacataggagtatctagtctagccagttagtatactactactgcgctgatgatgaattaactctgcatagatactgtacttgcctccctccaacacccaaccacctcctgctcggctcttaataacttggacacggatcgatgccatccaaggaagaacacgacgacgacgacggaacatccaccatgcaagcttgcatccatacgccgatacgcgtgcatccatccatccaccattatttccattttccaccgatcacacgtacacaggcctatttaaggagcgacatcccactgcaactctcctcaccactcatcaccagctagctctagcaaagcacttgccatctaccgaccgccgcattccaaacagcccgacgagctagcagagcggcaggcacctccctcctcaaggaacccatggccactgtgaacaactggctcgctttctccctctccccgcaggagctgccgccctcccagacgacggactccacactcatctcggccgccaccgccgaccatgtctccggcgatgtctgcttcaacatcccccaagattggagcatgaggggatcagagctttcggcgctcgtcgcggagccgaagctggaggacttcctcggcggcatctccttctccgagcagcatcacaaggccaactgcaacatgatacccagcactagcagcacagtttgctacgcgagctcaggtgctagcaccggctaccatcaccagctgtaccaccagcccaccagctcagcgctccacttcgcggactccgtaatggtggcttcctcggccggtgtccacgacggcggtgccatgctcagcgcggccgccgctaacggtgtcgctggcgctgccagtgccaacggcggcggcatcgggctgtccatgattaagaactggctgcggagccaaccggcgcccatgcagccgagggtggcggcggctgagggcgcgcaggggctctctttgtccatgaacatggcggggacgacccaaggcgctgctggcatgccacttctcgctggagagcgcgcacgggcgcccgagagtgtatcgacgtcagcacagggtggagccgtcgtcgtcacggcgccgaaggaggatagcggtggcagcggtgttgccggcgctctagtagccgtgagcacggacacgggtggcagcggcggcgcgtcggctgacaacacggcaaggaagacggtggacacgttcgggcagcgcacgtcgatttaccgtggcgtgacaaggcatagatggactgggagatatgaggcacatctttgggataacagttgcagaagggaagggcaaactcgtaagggtcgtcaagtctatttaggtggctatgataaagaggagaaagctgctagggcttatgatcttgctgctctgaagtactggggtgccacaacaacaacaaattttccagtgagtaactacgaaaaggagctcgaggacatgaagcacatgacaaggcaggagtttgtagcgtctctgagaaggaagagcagtggtttctccagaggtgcatccatttacaggggagtgactaggcatcaccaacatggaagatggcaagcacggattggacgagttgcagggaacaaggatctttacttgggcaccttcagcacccaggaggaggcagcggaggcgtacgacatcgcggcgatcaagttccgcggcctcaacgccgtcaccaacttcgacatgagccgctacgacgtgaagagcatcctggacagcagcgccctccccatcggcagcgccgccaagcgcctcaaggaggccgaggccgcagcgtccgcgcagcaccaccacgccggcgtggtgagctacgacgtcggccgcatcgcctcgcagctcggcgacggcggagccctggcggcggcgtacggcgcgcactaccacggcgccgcctggccgaccatcgcgttccagccgggcgccgccagcacaggcctgtaccacccgtacgcgcagcagccaatgcgcggcggcgggtggtgcaagcaggagcaggaccacgcggtgatcgcggccgcgcacagcctgcaggacctccaccacctgaacctgggcgcggccggcgcgcacgactttttctcggcagggcagcaggccgccgccgctgcgatgcacggcctgggtagcatcgacagtgcgtcgctcgagcacagcaccggctccaactccgtcgtctacaacggcggggtcggcgacagcaacggcgccagcgccgtcggcggcagtggcggtggctacatgatgccgatgagcgctgccggagcaaccactacatcggcaatggtgagccacgagcaggtgcatgcacgggcctacgacgaagccaagcaggctgctcagatggggtacgagagctacctggtgaacgcggagaacaatggtggcggaaggatgtctgcatgggggactgtcgtgtctgcagccgcggcggcagcagcaagcagcaacgacaacatggccgccgacgtcgggcatggcggcgcgcagctcttcagtgtctggaacgacacttaagcgtacctagtggtacctgacatcttatagtctgcaacctctcgtgtctgaattcctatctttatcaagtgttattgcttccacgactataggacagctttcgtcgaaagcttttgctcatgtgatctcgaaggattcatctagtctgatttttcgtgacttgtatcggttttattggattcatccaacatatatcaataaaaaatgagttgtgtttcctttcttcctagttcagttaaaattatttccctcctgcgcttgtgctgtaattgtctgtgtacctgttgtttgtgactgtgttagttcccttggatatgatttcgtatttgatatgtacatggagatagcttagcttcattattggagtatgaagttagtatgacatagtcactctcctggaaaattgacactgcaaaccatatttttattctgaaccacaaatcctagtcagtccgctggcatatgccgtccgtttgctgaatccagaacgtgggtttggagatgtacggctgagatgcctctatgcgaaggggatttcgtggtgaaacgagatgggagtagagcaacgcccgtggaagatgcttcaaacttccacacttttgagcaacgatcggcagtagtaaggtagacgatttcaagatcaaagcatatgaagataaacaacatcaacaacaaaatttgttggggttctatagagagaaacagagctacatacatacactgttttgtatctaccatctgagatgatgaaaagatgaaaaactaaagaatgccccggcgccaacgccaggacacgccgcgcgcgcgtcacccgagccatctcttgacccagccggcgctgtatatttacacacgttgcagcatcgatcaccacctgttcgatcgcgtcgccgtcaccgggatctgagtcgaaacctagacttgtccatcttctggattggccaacttaattaatgtatgaaataaaaggatgcacacatagtgacatgctaatcactataatgtgggcatcaaagttgtgtgttatgtgtaattactagttatctgaataaaagagaaagagatcatccatatttcttatcctaaatgaatgtcacgtgtctttataattctttgatgaaccagatgcatttcattaaccaaatccatatacatataaatattaatcatatataattaatatcaattgggttagcaaaacaaatctagtctaggtgtgttttgcgaatgcgaccttcttatgtgcttctagtctccaaatgtggttgatagttattttgctctaagatcaacagtaatgaagtataaatcatcgttgtggtgtgctactcggttaattgagcattaacacacacaaacatgacgaggatggtataatctccaaaaatgtgtactttgttaggtgggaccctatagccttgattaatgtgctatgttaggcatgcctggaaacgtgtgacgcatatgttttgtgaacctgttgatattatatgtgcttttatattaccatattttattaaaatactaatatttattactagtaagatataacattctatctagcttaaaaactaaccataaatattccataataactagatttaccaaactaatatactaaatatacataataaatacaaaattaacaagacaataatcaatatttatgagcttaatatatttagacattatggttggtcgacgataatcatgctaacttttcgtaattgcttgattgaaatatgcttagaataatgcctctttgttctacatggcaaatagggaccattatggtgtaacaccctgggaaccacaaacaccccgaaatgctactaaactacacaactaaccttcatatataaaatttcgacagcatctcctttgaaaatttgcatagacgtggaagcaacagagtataaacagatatcatgataagaaaacatactagacattaataatctgctagaaatgggaagaatcctaacttgacgactgcgtaactgactagagtcacacttagctgaccctagtcacttacaactgacttcgtgtcctagatcgatgggccctggccgaagcttggtcacccggtccgggcctagaaggccagcttcaagtttgtaccctggagcttgccgagtgccatccttggacactcgataaagtatattttattttttttattttgccaaccaaactttttgtggtatgttcctacactatgtagatctacatgtaccattttggcacaattacatatttacaaaaatgttttctataaatattagatttagttcgtttatttgaatttcttcggaaaattcacatttaaactgcaagtcactcgaaacatggaaaaccgtgcatgcaaaataaatgatatgcatgttatctagcacaagttacgaccgatttcagaagcagaccagaatcttcaagcaccatgctcactaaacatgaccgtgaacttgttatctagttgtttaaaaattgtataaaacacaaataaagtcagaaattaatgaaacttgtccacatgtcatgatatcatatatagaggttgtgataaaaatttgataatgtttcggtaaagttgtgacgtactatgtgtagaaacctaagtgacctacacataaaatcatagagtttcaatgtagttcactcgacaaagactttgtcaagtgtccgataaaaagtactcgacaaagaagccgttgtcgatgtactgttcgtcgagatctctttgtcgagtgtcacactaggcaaagtctttacggagtgtttttcaggctttgacactcggcaaagcgctcgattccagtagtgacagtaatttgcatcaaaaatagctgagagatttaggccccgtttcaatctcacgggataaagtttagcttcctgctaaactttagctatatgaattgaagtgctaaagtttagtttcaattaccaccattagctctcctgtttagattacaaatggctaaaagtagctaaaaaatagctgctaaagtttatctcgcgagattgaaacagggccttaaaatgagtcaactaatagaccaactaattattagctattagtcgttagcttctttaatctaagctaaaaccaactaatagcttatttgttgaattacaattagctcaacggaattctctgtttttctaaaaaaaaactgcccctctcttacagcaaattgtccgctgcccgtcgtccagatacaatgaacgtacctagtaggaactcttttacacgctcggtcgctcgccgcggatcggagtccccggaacacgacaccactgtggaacacgacaaagtctgctcagaggcggccacaccctggcgtgcaccgagccggagcccggataagcacggtaaggagagtacggcgggacgtggcgacccgtgtgtctgctgccacgcagccttcctccacgtagccgcgcggccgcgccacgtaccagggcccggcgctggtataaatgcgcgccacctccgctttagttctgcatacagccaacccaaggatgtccaacctgctcacggttcaccagaaccttccggctcttccagtggacgcgacgtccgatgaagtcaggaagaacctcatggacatgttccgcgacaggcaagcgttcagcgagcacacctggaagatgctgctctccgtctgccgctcctgggctgcatggtgcaagctgaacaacaggaagtggttccccgctgagcccgaggacgtgagggattaccttctgtacctgcaagcgcgaggtttgtttctgcttctacctttgatatatatataataattatcattaattagtagtaatataatatttcaaatatttttttcaaaataaaagaatgtagtatatagcaattgcttttctgtagtttataagtgtgtatattttaatttataacttttctaatatatgaccaaaacatggtgatgcctaggtctggcagtgaagaccatccagcaacaccttggacaactgaacatgcttcacaggcgctccggcctcccgcgccccagcgactcgaacgccgtgagcctcgtcatgcgccgcatcaggaaggaaaacgtcgatgccggcgaaagggcaaagcaggccctcgcgttcgagaggaccgatttcgaccaggtccgcagcctgatggagaacagcgacaggtgccaggacattaggaacctggcgttcctcggaattgcatacaacacgctcctcaggatcgcggaaattgcccgcattcgcgtgaaggacattagccgcaccgacggcggcaggatgcttatccacattggcaggaccaagacgctcgtttccaccgcaggcgtcgaaaaggccctcagcctcggagtgaccaagctcgtcgaacgctggatctccgtgtccggcgtcgcggacgacccaaacaactacctcttctgccgcgtccgcaagaacggggtggctgcccctagcgccaccagccaactcagcacgagggccttggaaggtattttcgaggccacccaccgcctgatctacggcgcgaaggatgacagcggtcaacgctacctcgcatggtccgggcactccgcccgcgttggagctgctagggacatggcccgcgccggtgtttccatccccgaaatcatgcaggcgggtggatggacgaacgtgaacattgtcatgaactacattcgcaaccttgacagcgagacgggcgcaatggttcgcctcctggaagatggtgactgagctagacccagctttcttgtacaaagtggccgttaacggatccagacttgtccatcttctggattggccaacttaattaatgtatgaaataaaaggatgcacacatagtgacatgctaatcactataatgtgggcatcaaagttgtgtgttatgtgtaattactagttatctgaataaaagagaaagagatcatccatatttcttatcctaaatgaatgtcacgtgtctttataattctttgatgaaccagatgcatttcattaaccaaatccatatacatataaatattaatcatatataattaatatcaattgggttagcaaaacaaatctagtctaggtgtgttttgcgaattgcggcaagctgttaccgaattcctgcccttaaggccaattgttcaagattcattcaacaattgaaacatctcccatgattaaatcagtataaggttgctatggtcttgcttgacaaagtttttttttgagggaatttcaactaaatttttgagtgaaactatcaaatactgattttaaaaaatttttataaaaggaagcgcagagataaaaggccatctatgctacaaaagtacccaaaaatgtaatcctaaagtatgaattgcattttttttttgtttggacgaaaggaaaggagtattaccacaagaatgatatcatcttcatatttagatcttttttgggtaaagcttgagattctctaaatatagagaaatcagaagaaaaaaaaaccgtgttttggtggttttgatttctagcctccacaataactttgacggcgtcgacaagtctaacggacaccaagcagcgaaccaccagcgccgagccaagcgaagcagacggccgagacgttgacaccttcggcgcggcatctctcgagagttccgctccggcgctccacctccaccgctggcggtttcttattccgttccgttccgcctcctgctctgctcctctccacaccacacggcacgaaaccgttacggcaccggcagcacccagcacgggagaggggattcctttcccaccgttccttccctttccgccccgccgctataaatagccagccccatccccagcttttttccccaatctcatctcctctctcctgttgttcggagcacacgcacaatccgatcgatccccaaatccccttcgtctctcctcgcgagcctcgtggatcccagcttcaaggtacggcgatcgatcatcccccctccttctctctaccttcttttctctagactacatcggatggcgatccatggttagggcctgctagtttcccttcctgttttgtcgatggctgcgaggcacaatagatctgatggcgttatgacggctaacttgtcatgttgttgcgatttatagtccctttaggagatcagtttaatttctcggatggttcgagatcggtggtccatggttagtaccctaagatccgcgctgttagggttcgtagatggaggcgacctgttctgattgttaacttgtcagtacctgggaaatcctgggatggttctagctcgtccgcagatgagatcgatttcatgatcctctgtatcttgtttcgttgcctaggttccgtctaatctatccgtggtatgatgtagatgttttgatcgtgctaactacgtcttgtaaagttaattgtcaggtcataatttttagcatgcctttttttttgtttggttttgtctaattgggctgtcgttctagatcagagtagaagactgttccaaactacctgctggatttattgaacttggatctgtatgtgtgtcacatatcttcataaattcatgattaagatggattgaaatatcttttatctttttggtatggatagttctatatgttggtgtggctttgttagatgtatacatgcttagatacatgaagcaacgtgctgctactgtttagtaattgctgttcatttgtctaataaacagataaggatatgtatttatgttgctgttggttttgctggtactttgttggatacaaatgcttcaatacagaaaacagcatgctgctacgatttaccatttatctaatcttatcatatgtctaatctaataaacaaacatgcttttaaattatcttcatatgcttggatgatggcatacacagcggctatgtgtggttttttaaatacccagcatcatgggcatgcatgacactgctttaatatgctttttatttgcttgagactgtttcttttgtttatactgaccctttagttcggtgactcttctgcaggtcgactttaacttagcctaggatccatggcccagtccaagcacggcctgaccaaggagatgaccatgaagtaccgcatggagggctgcgtggacggccacaagttcgtgatcaccggcgagggcatcggctaccccttcaagggcaagcaggccatcaacctgtgcgtggtggagggcggccccttgcccttcgccgaggacatcttgtccgccgccttcatgtacggcaaccgcgtgttcaccgagtacccccaggacatcgtcgactacttcaagaactcctgccccgccggctacacctgggaccgctccttcctgttcgaggacggcgccgtgtgcatctgcaacgccgacatcaccgtgagcgtggaggagaactgcatgtaccacgagtccaagttctacggcgtgaacttccccgccgacggccccgtgatgaagaagatgaccgacaactgggagccctcctgcgagaagatcatccccgtgcccaagcagggcatcttgaagggcgacgtgagcatgtacctgctgctgaaggacggtggccgcttgcgctgccagttcgacaccgtgtacaaggccaagtccgtgccccgcaagatgcccgactggcacttcatccagcacaagctgacccgcgaggaccgcagcgacgccaagaaccagaagtggcacctgaccgagcacgccatcgcctccggctccgccttgccctccggactcagatctcgatagggtaccaatggccagttaacagatccagctgctgctgttctagggttcacaagtctgcctatttgtcttccccaatggagctatggttgtctggtctggtccttggtcgtgtcccgtttcattgtgtactatttacctgtaatgtgtatccttaagtctggtttgatggtgtctgaaacgttttgctgtggtagagcagcatggaagaactataatgaataagtgatccctaatcattgtgtccaaattttgcttctgctatacccttttgtgctgtttcttatgttttgcttaaaaatttgatctgacaaacaaatttgtctaaattatgctcttgttctgactgtgtactgtacacatttgtattgctaccggtttggcacatagttttctctttgattgcagatcaaacccttctgattgcagattgcttggctatggctgatgtgctcactgttcttctttagcttgtatattgctgatggtggcttggctacggctgaaaaagttgctgctgcgccgacttggcaactgttgctccagtaatgctttgtcctctcttcctagccgccgacttggcacttggcagctgttgctcctgtaatgcgttgttatctcttatctcttgagatgtactatgattttgaggctgtttgacttgtgccagattgccagtgctgatgctatattatctcaggtttttatgctagtatatgttttactgtgtgctgcctgtgtcgagttacgtaatctattgaaccgctatgcgtgttgatgccctgttgttgcttgccagattgatgcccctgttgcttgcagcttgcaagctgtagtgaaatcctaaaattcgaaaccaaatctattctgaacttttgaagatctgtgatgtccggaagaaaagattcaaacagataaacgggactctccagaatctataaaataaatgatcgacaaacgctttgctttggtaggcttcctagttagttagcggaccgaagcttcggtccgggcctagaaggccagcttcggccgccccatttcaaatatttttttcaaaataaaagaatgtagtatatagcaattgcttttctgtagtttataacttcgtatagcatacattatacgaagttatacttttctaatatatgaccaaaatttgttgatgtgcaggtcttcgcctaccccggcggcgcgtccatggagatccaccaggcactcacccgctcccccgtcatcgccaaccacctcttccgccacgagcaaggggaggcctttgccgcctccggctacgcgcgctcctcgggccgcgtcggcgtctgcatcgccacctccggccccggcgccaccaacctagtctccgcgctcgccgacgcgctgctcgattccgtccccatggtcgccatcacgggacaggtggcgcgacgcatgattggcaccgacgccttccaggagacgcccatcgtcgaggtcacccgctccatcaccaagcacaactacctggtcctcgacgtcgacgacatcccccgcgtcgtgcaggaggctttcttcctcgcctcctctggtcgaccagggccggtgcttgtcgacatccccaaggacatccagcagcagatggcggtgcctgtctgggacaagcccatgagtctgcctgggtacattgcgcgccttcccaagccccctgcgactgagttgcttgagcaggtgctgcgtcttgttggtgaatcgcggcgccctgttctttatgtgggcggtggctgcgcagcatctggtgaggagttgcgacgctttgtggagctgactggaatcccggtcacaactactcttatgggcctcggcaacttccccagcgacgacccactgtctctgcgcatgctaggtatgcatgggacggtgtatgcaaattatgcagtggataaggccgatctgttgcttgcacttggtgtgcggtttgatgatcgcgtgacagggaagattgaggcttttgcaagcagggctaagattgtgcacgttgatattgatccggctgagattggcaagaacaagcagccacatgtgtccatctgtgcagatgttaagcttgctttgcagggcatgaatgctcttcttgaaggaagcacatcaaagaagagctttgactttggctcatggaacgatgagttggatcagcagaagagggaattcccccttgggtataaaacatctaatgaggagatccagccacaatatgctattcaggttcttgatgagctgacgaaaggcgaggccatcatcggcacaggtgttgggcagcaccagatgtgggcggcacagtactacacttacaagcggccaaggcagtggttgtcttcagctggtcttggggctatgggatttggtttgccggctgctgctggtgcttctgtggcaaacccaggtgtcactgttgttgacatcgatggagatggtagctttctcatgaacgttcaggagctagctatgatccgaattgagaacctcccagtgaaggtctttgtgctaaacaaccagcacctggggatggtggtgcagttggaggacaggttctataaggccaacagagcgcacacatacttgggaaacccagagaatgaaagtgagatatatccagatttcgtgacgatcgccaaagggttcaacattccagcggtccgtgtgacaaagaagaacgaagtccgcgcagcgataaagaagatgctcgagactccagggccgtacctcttggatataatcgtcccacaccaggagcatgtgttgcctatgatccctagtggtggggctttcaaggatatgatcctggatggtgatggcaggactgtgtactgatgactagctagtcagttaacagatctgccagatcctcggtgtacaaataacccgtcttatcctatgagacgggccggcgtcagtgtgttctggaggaatttttatgtcagagcctttttctttgtgtgcttgatgtagatgccaagggaagcttattggctgttgaagcttgatgcaaaataaattatggaactctgttttttgtttatctaataataactagcaaatatgcttccattgcattgaaactaacagccttttgtgtttccaagttttattttgtgacaatgtcatctatttcaattagttgtggaatcggaaacttgcaggactaacttggaaactccaatccctcagcatcctggactttttcctggtgtaatccatgtagatattattttaatcatcattttagttctggaggtttttccatctccggttttgctcccctttcttcaaaaaaaaaaaaaaaatgccgtaggcgccgcaacgcccacctgttgttcaaactcatgggcacgagtggctcgaagattttatacaacaattgctgtagtttcaccgttgctggtgaagaagcatttttttaaaaaaatatagtggtattcattttaattagtttagttgtgcagcgagcaaaatttggacatgctctgctcggaatctgatcgacctagacacagattagcagcagtagctttgtcatctgttccaagagttgcgatctgatagaagaaaaaaaaaccttcccttcaatgtaaaaccgaaactaacaagaaagaagcacagtgccgtttaggcaagtatggagtacgtattaagcatgtagaaggccatgcatgaaccactaacaagaaagaagcgcagtgccattcaggcaagcataagcatgtagattggcatgcatgaacaactaacagtagatcgtctctggtctgattagaagttttttgggaagccaagaaatcatgtacaactggttccatctcaaattccgtggcaaaaagaggcctaagcaacataaagctttccactggttgccatatatgatttgggcatttcactttgatcttaatgggccttgtaaagcccaagactcatgattatctttagttgatgctcttaattaggtgtgggcaaataattcaaactgtatgtacccgaccaaaaccaaagcaaaaataatcgaaccaaaccgaaaatttaaaaataaccgaatgaaaactaaatcctataactgaaagaactgaaaccgaatcaaaatatttaatgtaaccaaaaatatccgaaatataattatattgtcaaaaatattaataatttctagattaaataattaaaaatacttaaaaatttatataaaatagtaaaaatactcgaaaataaccacaaatattcaaaaacaaccgaaatatcccaaaatattcaaagcaaaataaccgaatggataccaaattttaaaaccgaaaaaactggaacaaaaccaaaatcgaaccaaaatttcaaaaatcgaataaatactaaactttagaacaaaaaaaaacgataaccgaatgtatacgaaccaaagccgaattagataaccgaacgtccaggactactcttaatctttccgccacttatgatttgggctattactttgtttataatgagccttttcaagctcaagttcatgattgtccgtgagatgagaaactgacttgttggattcgaaaccctagctagtattggttaatacttaatacataaatgacctgcattgacatcatcatccaagaaaataaaaattgtatgcttgagatatttagttttcctagctaggttttctttattttagtaccgaatctttaggtgtgccacgttaatttagacccattttttcatacttaccaactgagtctagtttaatcatgactataatcgtataaaatgattcagtcgacgtcattgcgaacgtatataaaatcatccaaattgacgtcattccaaagaggtaagcatgcttatctaagagtccgagcatactaaacaagacgacattttatttgcactccaaatcaaattttgtattgcctaaagaaaaacaatcaaactcaagtttcttaaaattaatttcattcaaactaatcactttcaatatctcacatattattcatgccatttctatttgtctaaacatgatttaaaaaaaaaagtaaaatacaaagattactatgcaaaaactctataaaaaaaaattcaaatttcttatttatttgtgacatcaaattttcaaaataatttttttaattatcggttgatccggtcagtcgataaaaacataaactttcagcgaccgttaaaactttcctactaccgatttagagaaaatcttagcttgaaacgtaattgtaacctgccttcatgcaagtcgcaagatatgtcatcctaagttgtatatgttttctcaaaagatgtatttacttgagaaaatacgtttcaacgttgatggacaaccaattaagaatcaagcacctttcgtaatcaatttaggcttatcgtctaaggtatactgatttacgacagttgactagacttataaggaacaaaataatagaatagtttctaaacacttcacctaatcatagagactaagatggtaattcgtaaacgacaaagcctagtgacactgtccattgtaaaattccacatcatattagtattaaacatatacatgtagtttcctgaacacatgtagtatcaaacacacttcgtggcttcttcctcgaaacctgcggccgctcattaattaagtcatctagttgaaggatcgctatcaactttgtatagaaaagttgggccgaattcgagctcggtacggccagaatggcccggaccgaagcttatcttgcaagagcatccggccggatattgctttgcaaagatttgctagctagcagcacatgagatcgagttatgatctccaggtgtactcatgctctccttatgtttggatatactgatcttggatatctatagaagatccccaggtacaagatcaatgacatacttctgcacacttcgtgggattgtacagaatgatatactacatactgaaggtatgtggtggtcatgattttatatcattgaccttattatctataaagataatattacttggtgttgtttagatgaaaaacaagttacaaactaagtctctaccttacttcacattttaaatgtgtttgagagcaggtatgggatgacttagtaatttgcaaagatcagggggagtttcctcttgatcgaaagaacttgtttatacatcatggtgtactcttttctttgcatgagttttcccctgtttgggtttctcattcaaagtttttaacgaggcaacatcaacataaggcctatgtcgtatcatctatttttcccgtagaggttttcgaggatgatacattatggcatagttattgttgtatttgaactaggtgataagtttatctccctagagttcaaatgaatcaacaatagagtatgactactctccttatttctcccactgggtttttaaggagactcagctaatatgttgatttctcagattttctggcaagattatcttggagaaatattagcctgagttatatgtctcatcatttattttccccactggggtttttgagatgatgactatagacatgttattgttctttggtctagaggtccattggagaacaatatcgtaccatggttcaattgaaccaccgacaattatctataaggataattgagcttgtgttgttcagatggaaacaggttatatgaggagcaacatattgctcctaaattgttttatccccatgaacttcaggaaaatgaagatataaacatcttgcaaacaaagtcttgtgataatcttgctgatctattcacaaaatctctaccatactcaacgttttcagaaatgtgttgaggtgattggtatgagaagactcaagtgtttgcaagatcagggggagtaattctccgtgatatttgacctgttttataccatcatattacactcttttctttgtatgagttttgccttgttaaggttttctcatccaaagtttttaacgaggtaatatcaactaagctatatgcttcatcattcactttttcccacaggggtttttatgcatgatgattacaagcatattcttttggagttcaatatgagttttactcataatccaaaagacattgtgtactccttatttttcccacagggtttttgaggagatgatatattggaagacaacttgcagatgatctagtggacttggattgatcaagggggagtgttacaaaatattgtcatgtgatcaaccctctcccctgacagttttctttcaagggacacaccccttgggagacactgtatccacatgtatataaaccagattatctgcaataaagatctacaactgtcatttgtctctctctcaatctcgttactactgagtatactataacaggttcgaccaaaaatagcaaatggtggtctggcttctcgtcatgcatggttttacacgtgtacaggcgagaaagctcatcttaacaaatttaataacccaaatatatatgcatagaaatacccgaccatttgtttgttgagctagcgtgtggctcgcctttggcctcgcctgacctcaccttatatttctaataataccacgtctccctccttatatttaccctcttctcccaagagaaaaatcgggctccaatgcaaacaccagttttctaccctaaacacaagaacccagatgcataataaaaggtgaaagctagcagaagaggtacctaactctaccctactatagagaaaaagtcagcacattgcaagcaataataggatccatgcgcgaaattctgcatattcagggcggccagtgcggcaaccagattggcagcaaattttgggaagtggtgtgcgatgaacatggcattgatccgaccggccgctatatgggcaccagcgatgtgcagctggaacgcgtgaacgtgtattataacgaagcgagctgcggccgctttgtgccgcgcgcggtgctgatggatctggaaccgggcaccatggatgcggtgcgcaccggcccgtatggccagatttttcgcccggataactttgtgtttggccagagcggcgcgggcaacaactgggcgaaaggccattataccgaaggcgcggaactgattgatagcgtgctggatgtggtgcgcaaagaagcggaaaactgcgattgcctgcagggctttcaggtgtgccatagcctgcacgctggacaccgggaggcaatgcgcgaaattctgcatattcagggcggccagtgcggcaaccagattggcagcaaattttgggaagtggtgtgcgatgaacatggcattgatccgaccggccgctatatgggcaccagcgatgtgcagctggaacgcgtgaacgtgtattataacgaagcgagctgcggccgctttgtgccgcgcgcggtgctgatggatctggaaccgggcaccatggatgcggtgcgcaccggcccgtatggccagatttttcgcccggataactttgtgtttggccagagcggcgcgggcaacaactgggcgaaaggccattataccgaaggcgcggaactgattgatagcgtgctggatgtggtgcgcaaagaagcggaaaactgcgattgcctgcagggctttcaggtgtgccatagcctgatttaaatgcccgggcgatcgctcgaggcgtacctagtggtaccacatggttaacctagacttgtccatcttctggattggccaacttaattaatgtatgaaataaaaggatgcacacatagtgacatgctaatcactataatgtgggcatcaaagttgtgtgttatgtgtaattactagttatctgaataaaagagaaagagatcatccatatttcttatcctaaatgaatgtcacgtgtctttataattctttgatgaaccagatgcatttcattaaccaaatccatatacatataaatattaatcatatataattaatatcaattgggttagcaaaacaaatctagtctaggtgtgttttgcgaatgcggccgccaccgcggtggagctcgaattccggtccgggcctagaaggccagcttcaagtttgtacaaaaaagcaggctccggccagaatggcccggaccgggttaccgaattcgagctcggtaccctgggatccgatatcgatgggccctggccgaagcttggtcacccggtccgggcctagaaggccgatctcccgggcacccagctttcttgtacaaagtggccgttaacggatcggccagaatggcccggaccgaagcttgcatgcctgcagtgcagcgtgacccggtcgtgcccctctctagagataatgagcattgcatgtctaagttataaaaaattaccacatattttttttgtcacacttgtttgaagtgcagtttatctatctttatacatatatttaaactttactctacgaataatataatctatagtactacaataatatcagtgttttagagaatcatataaatgaacagttagacatggtctaaaggacaattgagtattttgacaacaggactctacagttttatctttttagtgtgcatgtgttctcctttttttttgcaaatagcttcacctatataatacttcatccattttattagtacatccatttagggtttagggttaatggtttttatagactaatttttttagtacatctattttattctattttagcctctaaattaagaaaactaaaactctattttagtttttttatttaataatttagatataaaatagaataaaataaagtgactaaaaattaaacaaataccctttaagaaattaaaaaaactaaggaaacatttttcttgtttcgagtagataatgccagcctgttaaacgccgtcgacgagtctaacggacaccaaccagcgaaccagcagcgtcgcgtcgggccaagcgaagcagacggcacggcatctctgtcgctgcctctggacccctctcgagagttccgctccaccgttggacttgctccgctgtcggcatccagaaattgcgtggcggagcggcagacgtgagccggcacggcaggcggcctcctcctcctctcacggcaccggcagctacgggggattcctttcccaccgctccttcgctttcccttcctcgcccgccgtaataaatagacaccccctccacaccctctttccccaacctcgtgttgttcggagcgcacacacacacaaccagatctcccccaaatccacccgtcggcacctccgcttcaaggtacgccgctcgtcctcccccccccccctctctaccttctctagatcggcgttccggtccatgcatggttagggcccggtagttctacttctgttcatgtttgtgttagatccgtgtttgtgttagatccgtgctgctagcgttcgtacacggatgcgacctgtacgtcagacacgttctgattgctaacttgccagtgtttctctttggggaatcctgggatggctctagccgttccgcagacgggatcgatttcatgattttttttgtttcgttgcatagggtttggtttgcccttttcctttatttcaatatatgccgtgcacttgtttgtcgggtcatcttttcatgcttttttttgtcttggttgtgatgatgtggtctggttgggcggtcgttctagatcggagtagaattctgtttcaaactacctggtggatttattaattttggatctgtatgtgtgtgccatacatattcatagttacgaattgaagatgatggatggaaatatcgatctaggataggtatacatgttgatgcgggttttactgatgcatatacagagatgctttttgttcgcttggttgtgatgatgtggtgtggttgggcggtcgttcattcgttctagatcggagtagaatactgtttcaaactacctggtgtatttattaattttggaactgtatgtgtgtgtcatacatcttcatagttacgagtttaagatggatggaaatatcgatctaggataggtatacatgttgatgtgggttttactgatgcatatacatgatggcatatgcagcatctattcatatgctctaaccttgagtacctatctattataataaacaagtatgttttataattattttgatcttgatatacttggatgatggcatatgcagcagctatatgtggatttttttagccctgccttcatacgctatttatttgcttggtactgtttcttttgtcgatgctcaccctgttgtttggtgttacttctgcaggtcgactttaacttagcctaggatccatggcctcctccgagaacgtcatcaccgagttcatgcgcttcaaggtgcgcatggagggcaccgtgaacggccacgagttcgagatcgagggcgagggcgagggccgcccctacgagggccacaacaccgtgaagctgaaggtgaccaagggcggccccctgcccttcgcctgggacatcctgtccccccagttccagtacggctccaaggtgtacgtgaagcaccccgccgacatccccgactacaagaagctgtccttccccgagggcttcaagtgggagcgcgtgatgaacttcgaggacggcggcgtggcgaccgtgacccaggactcctccctgcaggacggctgcttcatctacaaggtgaagttcatcggcgtgaacttcccctccgacggccccgtgatgcagaagaagaccatgggctgggaggcctccaccgagcgcctgtacccccgcgacggcgtgctgaagggcgagacccacaaggccctgaagctgaaggacggcggccactacctggtggagttcaagtccatctacatggccaagaagcccgtgcagctgcccggctactactacgtggacgccaagctggacatcacctcccacaacgaggactacaccatcgtggagcagtacgagcgcaccgagggccgccaccacctgttcctgtagggtaccacatggttaacctagacttgtccatcttctggattggccaacttaattaatgtatgaaataaaaggatgcacacatagtgacatgctaatcactataatgtgggcatcaaagttgtgtgttatgtgtaattactagttatctgaataaaagagaaagagatcatccatatttcttatcctaaatgaatgtcacgtgtctttataattctttgatgaaccagatgcatttcattaaccaaatccatatacatataaatattaatcatatataattaatatcaattgggttagcaaaacaaatctagtctaggtgtgttttgcgaatgcggccgccaccgcggtggagctcgaattccggtccgggcctagaaggccagcttcggccgccccgggcaactttattatacaaagttgatagatcctcatgtcttcatcgtaagcttaaacaggccagaatggcctctggattcagcggcctagaaggccgaagtacttggtcttcctagtcgagtagatcacattcaagcttggtcacccggtccgtcaatattctgattccgatgacttcgtaggttcctagctcaagccgctcgtgtccaagcgtcacttacgattagctaatgattacggcatctaggaccgactagtggcgcgccgactagctagctaaggtaccgagctcgaattcattccgattaatcgtggcctcttgctcttcaggatgaagagctatgtttaaacgtgcaagcgctactagacaattcagtacattaaaaacgtccgcaatgtgttattaagttgtctaagcgtcaatttgtttacaccacaatatatcctgcca

SEQ ID NO: 53 - DNA, 1500 bp, Zea mays
agaatccctgaaggtacaccccatttggttggaaatacatctcctcctacaggattatgtttgacttttttttgcaatgtgggacccacaggggaggggaggacgagaaggaaccagagagcctattttttgggctcctggcttcgcatggtttctaggggcggctccttcctattttcacaaaggagctagcagaggagcctcccatttcatgattttttgaaggacctaattaaggagccttgaaagagccctaccaaggtaggcctagaaataataaaggaggaaaaagagaaggtattacaatttttgtctacaacgtgaaaatgtttggccaaatagataaaacagtttgaattttatcggttcaattgtttattgagggcatgtttggcaggactttaatttagttctagcttcttccgcgaaaaatccagagccctacaaaatgacgtttggtaaaacaacttccgaaaaacacccaaaaaacccaagatattttatactacgaaggaaaggtcacacatcctagctagcttcactggttctagctccttccaattttgcaaaaaagtcacaaaggataagccatttttccaaatgatttgtgaaatgcctatgctaaaaagcctacttttccgaaaaaccagagctagagccatttttgacaagtcagaaccctaccaaatagtccctcagtttaagcaaagtgaggccatactgaagctaaattatgccaaattgggcctacatctccatattttcaaccaaatgctttagggtttcttgtaatcgacatgatttgtttcttcataaatagtatatggaccgctccaaaatactccatccgtttcaatttatatttcgtttgatctttttaccctaaatttgatcgactcgtcttattaaaaaaagttcataactattaataatctttactgtgatatcatttagcatataatatactttaattgtggctttgatttttttccgcaaaaattaaatgaaacgacccaatcaaacttgataaaaaagtaaaactaattataaatttggacagaaggagtaggagggtgtttgaatacactagagttaatagttagttgccttaaaatttgctagtacaattagctagctaacaaatatttaggtaactattagctaatttgctaaaaacagctaatagttaaactattagctagactgtttggatgtattcagctaattttagcagctaactattagctatagtataatattcaaacacctcctaattaaaatggacaaatatctcttcccttggtcccttgcgttagatttccatatctccttatttagtataaaaagaatcatcaaaaagtggacaacccctagtggaacaccattttagtagtggttgcatgaaacctttcgcgcatcagttactatgtgtcactctaaaaatggggcagcatgtacgcagtgcctatatttatacaaggcatctatcgttgcctcctc

SEQ ID NO: 54 - DNA, 1500 bp, Zea mays
atgttcttgaatataaaattgataaccaaaattcgaaccatcacttatacataattttactttattttttataaaacgtgaacgggaaggactaccatgaatgactatagaaccaatcatactagtataaaatatatgatgacactacgagagagacaaactttgtctggcgctaaatattttgccgagtgtgaattcacgggcactaggcaaagatcttctttgccgagtgttacgctgggcaaagtaagacactaggtaaatcagtcatttgccgagtgtccgccactaggcaaagcaaaacactggcaaatcaaaagtttacctagtgccagacactaggcaaaaaaaaacgctcggcaaatcggaagtttccctagtgccagacactagacaaagaaaaacacttgataaactagcgtcgtcagctaacaccatccaccaaccgttaacgttgccgagtatctgacttcgacactcggcaaagaaggtctctttgcctagtgtcggtctggaacactaggcaaagaggcactttacctagtgtcgtattttgacactcagtaaaataattttttttctttctgcttccaaactttttatgatgtgttcctatagcacctagaactacatgtcaagttttggtaaaatttttgaagtttttgctatatttacttaatttattttatttaattgaatttcttttgataattcaaatttgaactcggcaaggtaagaagcgagggtagcctggaaacacactttgcctagtgttacactcggtacaggagcctcccctgcctagtgctgcactcgacaaaagattcgcctttgcctagcgctgcactcggcacaggagtcgcctttgcctagtgctgcactaggcaaagcctccgttaccgtgccttccatcgtcatggaaacttttcttcgccgagtgacgtgtggcactaggcaaagtttttgccgagtgcccgagaaatggcactcggcaaggactctttgtcgatcccttcgttgccgacttctttttgccgagtgcaacactaggcaaaccatttgccgagtgtaaaagaggctttgcctagtgtctgtggcactaggcaaagaagacgagtcctgtagtgaacctagtaggccagtgcgggaccattccaaaaaatacctataaaaataaatttaatattaaattaaacatatggtccacgtaccaagatattaaactcaaaagaacaattattacaatttatcttagctaaaaggccgagaaaagtatatgttaaaaaggagtgtgatcccatttttatagctcgctcggtcgatcgcccgtccacttttaggtaacgaggtggtaccatgtaggagtgttgcgttgcgtgcgacttcctatcatgttgggcttaggtggcttctcacgacccaatgataggcgagaagtgtggaagatgaacaaacctacttgtttcgtgcacgacgcatgtgtttgaacaacgagttaga

SEQ ID NO: 55 - DNA, 16021 bp, Artificial Sequence
  DHI plasmid
gtttacccgccaatatatcctgtcaaacactgatagtttaaactgaaggcgggaaacgacaatctgatcatgagcggagaattaagggagtcacgttatgacccccgccgatgacgcgggacaagccgttttacgtttggaactgacagaaccgcaacgttgaaggagccactcagcaagctggtacgattgtaatacgactcactatagggcgaattgagcgctgtttaaacgctcttcaactggaagagcggttacgctgtttaaacgctcttcaactggaagagcggttactaccggttcactagctagctgctaatcgagctagttaccctatgaggtgacatgaagcgctcacggttactatgacggttagcttcacgactgttggtggcagtagcgtacgacttagctatagttccggacttacccttaagcgatttaaatctgcggttaccgaattcgagctcggtaccctgggatctttgatcatttgttcatctcacatgatagttctaacaatatgcacaaattctatacatatctctcgtagttccataaactacgagagagatataggttttatgaacaaatttatttttagtttatcatatgaagaaatgttcaaaatataaaatgtacatcatgatgagttatacaaatttgtagttgaaaactttttcatttgaattaatttactgctttaaaatgtgtatgcagttggcttgatgtgagacaataagctaaaccacgggttttccatgggtttccacccaattacgggttggtttgggatcaataatgttattggatgggttgggtttaactttcctctagtatttttggttgggtgtgggatggatatcaaagtaattagatttgggtatgggtgggagcggattggattttttgccattagcaggcctatgcacttgtcggcgcacacggctggcgcgtgcacacaccttatcggcagacgccgccgctgctgctgctgatgcttcttcttcttccaccgattgattgagatccaaggaaatgctgggcgcgtttttaaactggctgatcggcttcgtcccatgatctgagatttccttttcagactgttgtatatgtagcggcgacatggataggatatgtatggaccgttttaattaatactaaatatcaatggtttaactcttcactattactcctagctagatgtgaaagctcgccctggaatgcacatgaacaactacaccgagttgggcagtttggcaatgcatgcagttcaagagccacgccggttaacccttcactttgtagttattgcctgcattttgtaaatttggtgtgaacttaattctaatctgtaattctgtatagagaatggtgcatgtactgaactcctgactgatcaaaacgtggggtccactttcctcgccgaaaaagaaaagagaaaaaaaggtttattgtccactttattaaaaactggacttatatatatgcttggaacaaatacttagggggtgtttggttttaggaatctctcaatctaaaataaggtggtgtatcataggtttattactcaaatttggtgggatgatctcattgctcatattagtactaactaactaactatgaggaatgagatggtgatggatcaacccattacattctacaaaccaaacaaaaaagtgaggagtgagaagatggtgaactagctcatttctcaaaccaaacactctattaataaaccaatcgcgtagctaataaatatatgtaacctcgacattctagctacagcttgtggttggtagaaaagcaaatcatgctcaaaataatgtgctccgaaacttcattacatttttcttcacttgagtgtacatacattttttttcccttggccctcttatccttaactaagaagcataaaacgggatttctcagccagttcttagcttctcttataaatacagaccttgtacaacactttcacctcctctcaggtggccaggatattttttctggccccttcctgccctcttcacactgacccatgtgttgttctatccctggaaagctatacctccttacccctatcagcttctcctcacatctcctctcgtcgccacccatgctatcaccgctctgatcacaagcaaggcaaaccctcactgttctatcaacgcccctcccttagctaggtaagtttctgcttctacctttgatatatatataataattatcattaattagtagtaatataatatttcaaatatttttttcaaaataaaagaatgtagtatatagcaattgcttttctgtagtttataacttcgtatagcatacattatacgaagttatacttttctaatatatgaccaaaatttgttaccgaattcagaatccctgaaggtacaccccatttggttggaaatacatctcctcctacaggattatgtttgacttttttttgcaatgtgggacccacaggggaggggaggacgagaaggaaccagagagcctattttttgggctcctggcttcgcatggtttctaggggcggctccttcctattttcacaaaggagctagcagaggagcctcccatttcatgattttttgaaggacctaattaaggagccttgaaagagccctaccaaggtaggcctagaaataataaaggaggaaaaagagaaggtattacaatttttgtctacaacgtgaaaatgtttggccaaatagataaaacagtttgaattttatcggttcaattgtttattgagggcatgtttggcaggactttaatttagttctagcttcttccgcgaaaaatccagagccctacaaaatgacgtttggtaaaacaacttccgaaaaacacccaaaaaacccaagatattttatactacgaaggaaaggtcacacatcctagctagcttcactggttctagctccttccaattttgcaaaaaagtcacaaaggataagccatttttccaaatgatttgtgaaatgcctatgctaaaaagcctacttttccgaaaaaccagagctagagccatttttgacaagtcagaaccctaccaaatagtccctcagtttaagcaaagtgaggccatactgaagctaaattatgccaaattgggcctacatctccatattttcaaccaaatgctttagggtttcttgtaatcgacatgatttgtttcttcataaatagtatatggaccgctccaaaatactccatccgtttcaatttatatttcgtttgatctttttaccctaaatttgatcgactcgtcttattaaaaaaagttcataactattaataatctttactgtgatatcatttagcatataatatactttaattgtggctttgatttttttccgcaaaaattaaatgaaacgacccaatcaaacttgataaaaaagtaaaactaattataaatttggacagaaggagtaggagggtgtttgaatacactagagttaatagttagttgccttaaaatttgctagtacaattagctagctaacaaatatttaggtaactattagctaatttgctaaaaacagctaatagttaaactattagctagactgtttggatgtattcagctaattttagcagctaactattagctatagtataatattcaaacacctcctaattaaaatggacaaatatctcttcccttggtcccttgcgttagatttccatatctccttatttagtataaaaagaatcatcaaaaagtggacaacccctagtggaacaccattttagtagtggttgcatgaaacctttcgcgcatcagttactatgtgtcactctaaaaatggggcagcatgtacgcagtgcctatatttatacaaggcatctatcgttgcctcctcatgtccaacctgctcacggttcaccagaaccttccggctcttccagtggacgcgacgtccgatgaagtcaggaagaacctcatggacatgttccgcgacaggcaagcgttcagcgagcacacctggaagatgctgctctccgtctgccgctcctgggctgcatggtgcaagctgaacaacaggaagtggttccccgctgagcccgaggacgtgagggattaccttctgtacctgcaagcgcgaggtttgtttctgcttctacctttgatatatatataataattatcattaattagtagtaatataatatttcaaatatttttttcaaaataaaagaatgtagtatatagcaattgcttttctgtagtttataagtgtgtatattttaatttataacttttctaatatatgaccaaaacatggtgatgcctaggtctggcagtgaagaccatccagcaacaccttggacaactgaacatgcttcacaggcgctccggcctcccgcgccccagcgactcgaacgccgtgagcctcgtcatgcgccgcatcaggaaggaaaacgtcgatgccggcgaaagggcaaagcaggccctcgcgttcgagaggaccgatttcgaccaggtccgcagcctgatggagaacagcgacaggtgccaggacattaggaacctggcgttcctcggaattgcatacaacacgctcctcaggatcgcggaaattgcccgcattcgcgtgaaggacattagccgcaccgacggcggcaggatgcttatccacattggcaggaccaagacgctcgtttccaccgcaggcgtcgaaaaggccctcagcctcggagtgaccaagctcgtcgaacgctggatctccgtgtccggcgtcgcggacgacccaaacaactacctcttctgccgcgtccgcaagaacggggtggctgcccctagcgccaccagccaactcagcacgagggccttggaaggtattttcgaggccacccaccgcctgatctacggcgcgaaggatgacagcggtcaacgctacctcgcatggtccgggcactccgcccgcgttggagctgctagggacatggcccgcgccggtgtttccatccccgaaatcatgcaggcgggtggatggacgaacgtgaacattgtcatgaactacattcgcaaccttgacagcgagacgggcgcaatggttcgcctcctggaagatggtgactgagctagacccagctttcttgtacaaagtggccgttaacggatccagaatgttcttgaatataaaattgataaccaaaattcgaaccatcacttatacataattttactttattttttataaaacgtgaacgggaaggactaccatgaatgactatagaaccaatcatactagtataaaatatatgatgacactacgagagagacaaactttgtctggcgctaaatattttgccgagtgtgaattcacgggcactaggcaaagatcttctttgccgagtgttacgctgggcaaagtaagacactaggtaaatcagtcatttgccgagtgtccgccactaggcaaagcaaaacactggcaaatcaaaagtttacctagtgccagacactaggcaaaaaaaaacgctcggcaaatcggaagtttccctagtgccagacactagacaaagaaaaacacttgataaactagcgtcgtcagctaacaccatccaccaaccgttaacgttgccgagtatctgacttcgacactcggcaaagaaggtctctttgcctagtgtcggtctggaacactaggcaaagaggcactttacctagtgtcgtattttgacactcagtaaaataattttttttctttctgcttccaaactttttatgatgtgttcctatagcacctagaactacatgtcaagttttggtaaaatttttgaagtttttgctatatttacttaatttattttatttaattgaatttcttttgataattcaaatttgaactcggcaaggtaagaagcgagggtagcctggaaacacactttgcctagtgttacactcggtacaggagcctcccctgcctagtgctgcactcgacaaaagattcgcctttgcctagcgctgcactcggcacaggagtcgcctttgcctagtgctgcactaggcaaagcctccgttaccgtgccttccatcgtcatggaaacttttcttcgccgagtgacgtgtggcactaggcaaagtttttgccgagtgcccgagaaatggcactcggcaaggactctttgtcgatcccttcgttgccgacttctttttgccgagtgcaacactaggcaaaccatttgccgagtgtaaaagaggctttgcctagtgtctgtggcactaggcaaagaagacgagtcctgtagtgaacctagtaggccagtgcgggaccattccaaaaaatacctataaaaataaatttaatattaaattaaacatatggtccacgtaccaagatattaaactcaaaagaacaattattacaatttatcttagctaaaaggccgagaaaagtatatgttaaaaaggagtgtgatcccatttttatagctcgctcggtcgatcgcccgtccacttttaggtaacgaggtggtaccatgtaggagtgttgcgttgcgtgcgacttcctatcatgttgggcttaggtggcttctcacgacccaatgataggcgagaagtgtggaagatgaacaaacctacttgtttcgtgcacgacgcatgtgtttgaacaacgagttagactagttagttagcggaccgaagcttcggtccgggcctagaaggccagcttcggccgccccatttcaaatatttttttcaaaataaaagaatgtagtatatagcaattgcttttctgtagtttataacttcgtatagcatacattatacgaagttatacttttctaatatatgaccaaaatttgttgatgtgcagatggcgcccagcagctacgaggtggcggcttccatcctcctctgcgccgaggacagcagcagcatcctggacctcgaagcggaggccgaggaggaagcgctactggcgcggagcggggagcccggcggcggcgcggagttccccgtgccgtccgaggaatgcgtcgccggtttcctggagtctgaggcagcgcacatgccgcgggaggactacgccgagaggctgcgcagcggggggatggatctccgcgtccggacggacgccatcgactggatttggaaggttcacacgtgctacggtttcggccctctcactgcctgcttggccgtcaactacctggaccgcttcctctcgctctaccagcttccggaaggcaaggcttggatgacacagctgctgtccgtggcgtgcttgtccctggccgccaagatggaggagacctacgtcccttcgtccctggacctgcaggccggggacgcgcggtacgtgttcgaggcgaagacgatccagaggatggagctcctggtcctcagcacgctcaagtggaggatgcaagcggtcacccccttgtcgtacgtcgactacttcctccaccggctccgaggcggcgccgcgccgagcagacgcgccgtcctccgatccgcggagctcatcctgtgcatcgccagagggacgcactgcttggatttcaggccctcggagatcgccttggccgtcgccgccaccgtggccggcgaagagcgcgccgtggacatcgacagggccttcacccaccgtgtacataaggagagggtgtcgcgatgcctcgaagcgatccagcaggccaccgccaccatggccctgccgcagccgctgaaaagtgaaggcccgagcagcagcggccgcagggcctcgtcttcctcggccaccgtgccgcggagccccaccggggtgctggacgctggctgcctgagctacaggagagccgccgccgccgccgcctcgcacgcgagctccagctggcgcgacgaggacgacgacgactgccccccggctgtctgcagcaagaggaggaagattagcagatgaggtaccacatggttaacctagacttgtccatcttctggattggccaacttaattaatgtatgaaataaaaggatgcacacatagtgacatgctaatcactataatgtgggcatcaaagttgtgtgttatgtgtaattactagttatctgaataaaagagaaagagatcatccatatttcttatcctaaatgaatgtcacgtgtctttataattctttgatgaaccagatgcatttcattaaccaaatccatatacatataaatattaatcatatataattaatatcaattgggttagcaaaacaaatctagtctaggtgtgttttgcggttaccggcctagaaggccgatctcccgggtgcagcgtgacccggtcgtgcccctctctagagataatgagcattgcatgtctaagttataaaaaattaccacatattttttttgtcacacttgtttgaagtgcagtttatctatctttatacatatatttaaactttactctacgaataatataatctatagtactacaataatatcagtgttttagagaatcatataaatgaacagttagacatggtctaaaggacaattgagtattttgacaacaggactctacagttttatctttttagtgtgcatgtgttctcctttttttttgcaaatagcttcacctatataatacttcatccattttattagtacatccatttagggtttagggttaatggtttttatagactaatttttttagtacatctattttattctattttagcctctaaattaagaaaactaaaactctattttagtttttttatttaataatttagatataaaatagaataaaataaagtgactaaaaattaaacaaataccctttaagaaattaaaaaaactaaggaaacatttttcttgtttcgagtagataatgccagcctgttaaacgccgtcgacgagtctaacggacaccaaccagcgaaccagcagcgtcgcgtcgggccaagcgaagcagacggcacggcatctctgtcgctgcctctggacccctctcgagagttccgctccaccgttggacttgctccgctgtcggcatccagaaattgcgtggcggagcggcagacgtgagccggcacggcaggcggcctcctcctcctctcacggcaccggcagctacgggggattcctttcccaccgctccttcgctttcccttcctcgcccgccgtaataaatagacaccccctccacaccctctttccccaacctcgtgttgttcggagcgcacacacacacaaccagatctcccccaaatccacccgtcggcacctccgcttcaaggtacgccgctcgtcctcccccccccccctctctaccttctctagatcggcgttccggtccatgcatggttagggcccggtagttctacttctgttcatgtttgtgttagatccgtgtttgtgttagatccgtgctgctagcgttcgtacacggatgcgacctgtacgtcagacacgttctgattgctaacttgccagtgtttctctttggggaatcctgggatggctctagccgttccgcagacgggatcgatttcatgattttttttgtttcgttgcatagggtttggtttgcccttttcctttatttcaatatatgccgtgcacttgtttgtcgggtcatcttttcatgcttttttttgtcttggttgtgatgatgtggtctggttgggcggtcgttctagatcggagtagaattctgtttcaaactacctggtggatttattaattttggatctgtatgtgtgtgccatacatattcatagttacgaattgaagatgatggatggaaatatcgatctaggataggtatacatgttgatgcgggttttactgatgcatatacagagatgctttttgttcgcttggttgtgatgatgtggtgtggttgggcggtcgttcattcgttctagatcggagtagaatactgtttcaaactacctggtgtatttattaattttggaactgtatgtgtgtgtcatacatcttcatagttacgagtttaagatggatggaaatatcgatctaggataggtatacatgttgatgtgggttttactgatgcatatacatgatggcatatgcagcatctattcatatgctctaaccttgagtacctatctattataataaacaagtatgttttataattattttgatcttgatatacttggatgatggcatatgcagcagctatatgtggatttttttagccctgccttcatacgctatttatttgcttggtactgtttcttttgtcgatgctcaccctgttgtttggtgttacttctgcaggtcgactttaacttagcctaggatccatggcctcctccgagaacgtcatcaccgagttcatgcgcttcaaggtgcgcatggagggcaccgtgaacggccacgagttcgagatcgagggcgagggcgagggccgcccctacgagggccacaacaccgtgaagctgaaggtgaccaagggcggccccctgcccttcgcctgggacatcctgtccccccagttccagtacggctccaaggtgtacgtgaagcaccccgccgacatccccgactacaagaagctgtccttccccgagggcttcaagtgggagcgcgtgatgaacttcgaggacggcggcgtggcgaccgtgacccaggactcctccctgcaggacggctgcttcatctacaaggtgaagttcatcggcgtgaacttcccctccgacggccccgtgatgcagaagaagaccatgggctgggaggcctccaccgagcgcctgtacccccgcgacggcgtgctgaagggcgagacccacaaggccctgaagctgaaggacggcggccactacctggtggagttcaagtccatctacatggccaagaagcccgtgcagctgcccggctactactacgtggacgccaagctggacatcacctcccacaacgaggactacaccatcgtggagcagtacgagcgcaccgagggccgccaccacctgttcctgtagggtaccacatggttaacctagacttgtccatcttctggattggccaacttaattaatgtatgaaataaaaggatgcacacatagtgacatgctaatcactataatgtgggcatcaaagttgtgtgttatgtgtaattactagttatctgaataaaagagaaagagatcatccatatttcttatcctaaatgaatgtcacgtgtctttataattctttgatgaaccagatgcatttcattaaccaaatccatatacatataaatattaatcatatataattaatatcaattgggttagcaaaacaaatctagtctaggtgtgttttgcccgggcacccagctttcttgtacaaagtgggcccttactttaacgcctctaaccaacacccctttatctttataaggaacaataaacagaatttgccccactgttctaaatcacctaataatatccccagctaaaaacaataaaggtttcctagaattaagacaagcatgactgttcctccaggagggtttggaacattgttgcagtcttgcagatacgggcgaagggtgagaaacagagcggagggctggaggtgacctcggtagtcgacgccggagttgagcttgacaacgacggggcggcccctgatggacttgaggaagtccgatggcgtcttcaccgtcccgccggcgcccgaggcgggcctgtcgctgccgccgccgccgctgctcatcttgcgcgctgtgcccccggcggtgtccctgtgttgcggatcgcgggtgggccaggtggatgcgagggcgacccgtttggactccggccggagccgccggatccctggtcggtgtcagtgccgtttactctgggccccacgtgtcagtaccgtctgtagatgacaacaacccgtcgtccacagtcatgtccaaaatatcctttcttcttttttttcgattcggatatctatcttccttttttttttccaaaaatcttcttgacgcaccagcgcgcacgtttgtggtaaacgccgacacgtcggtcccacgtcgatagaccccacccaccagtgagtagcgtgtacgtattcgggggtgacggacgtgtcgccgtcgtcttgctagtcccattcccatctgagccacacatctctgaacaaaaaaaaggagggaggcctccacgcacatccccctccgtgccacccgccccaaaccctcgcgccgcctccgagacagccgccgcaaccatggccaccgccgccgccgcgtctaccgcgctcactggcgccactaccgctgcgcccaaggcgaggcgccgggcgcacctcctggccacccgccgcgccctcgccgcgcccatcaggtgctcagcggcgtcacccgccatgccgatggctcccccggccaccccgctccggccgtggggccccaccgagccccgcaagggtgctgacatcctcgtcgagtccctcgagcgctgcggcgtccgcgacgtaagtttctgcttctacctttgatatatatataataattatcattaattagtagtaatataatatttcaaatatttttttcaaaataaaagaatgtagtatatagcaattgcttttctgtagtttacttttctaatatatgaccaaaatttgttgatgtgcaggtcttcgcctaccccggcggcgcgtccatggagatccaccaggcactcacccgctcccccgtcatcgccaaccacctcttccgccacgagcaaggggaggcctttgccgcctccggctacgcgcgctcctcgggccgcgtcggcgtctgcatcgccacctccggccccggcgccaccaacctagtctccgcgctcgccgacgcgctgctcgattccgtccccatggtcgccatcacgggacaggtggcgcgacgcatgattggcaccgacgccttccaggagacgcccatcgtcgaggtcacccgctccatcaccaagcacaactacctggtcctcgacgtcgacgacatcccccgcgtcgtgcaggaggctttcttcctcgcctcctctggtcgaccagggccggtgcttgtcgacatccccaaggacatccagcagcagatggcggtgcctgtctgggacaagcccatgagtctgcctgggtacattgcgcgccttcccaagccccctgcgactgagttgcttgagcaggtgctgcgtcttgttggtgaatcgcggcgccctgttctttatgtgggcggtggctgcgcagcatctggtgaggagttgcgacgctttgtggagctgactggaatcccggtcacaactactcttatgggcctcggcaacttccccagcgacgacccactgtctctgcgcatgctaggtatgcatgggacggtgtatgcaaattatgcagtggataaggccgatctgttgcttgcacttggtgtgcggtttgatgatcgcgtgacagggaagattgaggcttttgcaagcagggctaagattgtgcacgttgatattgatccggctgagattggcaagaacaagcagccacatgtgtccatctgtgcagatgttaagcttgctttgcagggcatgaatgctcttcttgaaggaagcacatcaaagaagagctttgactttggctcatggaacgatgagttggatcagcagaagagggaattcccccttgggtataaaacatctaatgaggagatccagccacaatatgctattcaggttcttgatgagctgacgaaaggcgaggccatcatcggcacaggtgttgggcagcaccagatgtgggcggcacagtactacacttacaagcggccaaggcagtggttgtcttcagctggtcttggggctatgggatttggtttgccggctgctgctggtgcttctgtggcaaacccaggtgtcactgttgttgacatcgatggagatggtagctttctcatgaacgttcaggagctagctatgatccgaattgagaacctcccagtgaaggtctttgtgctaaacaaccagcacctggggatggtggtgcagttggaggacaggttctataaggccaacagagcgcacacatacttgggaaacccagagaatgaaagtgagatatatccagatttcgtgacgatcgccaaagggttcaacattccagcggtccgtgtgacaaagaagaacgaagtccgcgcagcgataaagaagatgctcgagactccagggccgtacctcttggatataatcgtcccacaccaggagcatgtgttgcctatgatccctagtggtggggctttcaaggatatgatcctggatggtgatggcaggactgtgtactgatgactagctagtcagttaacagatctgccagatcctcggtgtacaaataacccgtcttatcctatgagacgggccggcgtcagtgtgttctggaggaatttttatgtcagagcctttttctttgtgtgcttgatgtagatgccaagggaagcttattggctgttgaagcttgatgcaaaataaattatggaactctgttttttgtttatctaataataactagcaaatatgcttccattgcattgaaactaacagccttttgtgtttccaagttttattttgtgacaatgtcatctatttcaattagttgtggaatcggaaacttgcaggactaacttggaaactccaatccctcagcatcctggactttttcctggtgtaatccatgtagatattattttaatcatcattttagttctggaggtttttccatctccggttttgctcccctttcttcaaaaaaaaaaaaaaaatgccgtaggcgccgcaacgcccacctgttgttcaaactcatgggcacgagtggctcgaagattttatacaacaattgctgtagtttcaccgttgctggtgaagaagcatttttttaaaaaaatatagtggtattcattttaattagtttagttgtgcagcgagcaaaatttggacatgctctgctcggaatctgatcgacctagacacagattagcagcagtagctttgtcatctgttccaagagttgcgatctgatagaagaaaaaaaaaccttcccttcaatgtaaaaccgaaactaacaagaaagaagcacagtgccgtttaggcaagtatggagtacgtattaagcatgtagaaggccatgcatgaaccactaacaagaaagaagcgcagtgccattcaggcaagcataagcatgtagattggcatgcatgaacaactaacagtagatcgtctctggtctgattagaagttttttgggaagccaagaaatcatgtacaactggttccatctcaaattccgtggcaaaaagaggcctaagcaacatagaatgcggccgccaccgcggtggagctcgaattccggtccgggcctagaaggccagcttcaagtttgtacaaaaaagcaggctccggccagaatggcccggaccgggttaccgaattcgagctcggtaccctgggatccgatatcgatgggccctggccgaagcttggtcacccggtccgggcctagaaggccgatctcccgggcacccagctttcttgtacaaagtggccgttaacggatcggccagaatggcccggaccgggttaccgaattcgagctcggtaccctgggatccgatatcgatgggccctggccgaagcttggtcacccggtccgggcctagaaggccagcttcggccgccccgggcaactttattatacaaagttgatagatcctcatgtcttcatcgtaagcttaaacaggccagaatggcctctggattcagcggcctagaaggccgaagtacttggtcttcctagtcgagtagatcacattcaagcttggtcacccggtccgtcaatattctggcgcgccgactagctagctaaggtaccgagctcgaattcattccgattaatcgtggcctcttgctcttcaggatgaagagctatgtttaaacgtgcaagcgctactagacaattcagtacattaaaaacgtccgcaatgtgttattaagttgtctaagcgtcaatttgtttacaccacaatatatcctgcca

SEQ ID NO: 56 - DNA, 8924 bp, Artificial Sequence
  RV020636
gtttacccgccaatatatcctgtcaaacactgcggccgcacttgaccgcggatggagccggagctgtggtgaggccatcgacgggaggtgggggagaacacagtctcagtgttctttgtgagtccgcaaggtttttagcttttctgtattaattaaggttgctgttggctgtagaatacggtcgtggaagagctgtatcggtagctactacgtaagctattatatactggaagtctggagctcgtcgatctccggtcgtcttcctccatttctcctcgtcttgctttgactgctgctaccatttgcttctgttttctgatgaagcatgccatgtcggccaccagtgtttgtgtggtttttgcagggaatggctttcaagtgctgtgattgaatggccctcgtcgtcctcggctgagctcacatggacgcgtcatgtgagtgagatatatgatcatatgatgagtggggttcgggtgagtgcgtacttgaagtaggatcccgctttcactcattcattcattggcctttaaaccgggaaattttcgcgaggagatggagggaagcaagcagggtgacgagtgcagagtgccgcgagcgctttgtcaaaaggcaccgccgtaggcaaaaaaatcaatggccctgactgactcgatggtagtactactgtagagactagagagggttgctccccatatcttcgtgtgacttttactccagcattgcatttccgtcattgagacgttaattaatagcagctttcgggacagatgactgtggccatgtttcgtcacggccgcttcgtgccagctgggggtactatagtactgtgattttgttagtaaaaactttcattaggccaccattgacgaccgggccttcgcttttgctgcgctaattaaccatttcccggcgaccgaagggaacatgaacatgccccgacacatgagggcatgaggactagtgttctccctgtcgttcgttgacttgactagtgatagtttaaacgctcttcaactggaagagcggttactaccggttcactagctagctgctaatcgagctagttaccctatgaggtgacatgaagcgctcacggttactatgacggttagcttcacgactgttggtggcagtagcgtacgacttagctatagttccggacttacccttaagataacttcgtatagcatacattatacgaagttatgggcccacgcgtgaagagcggttaccagagctggtcacctttgtccaccaagatggaactgtcttcggccagaatggccatctggattcagcaggcctagaaggccatttatcgctatcaactttgtatagaaaagttgggccgagctcggtacggccagaatggcccggaccgggttaccaagcggccgcatcgagcagctggcttgtggggaccagacaaaaaaggaatggtgcagaattgttaggcgcacctaccaaaagcatctttgcctttattgcaaagataaagcagattcctctagtacaagtggggaacaaaataacgtggaaaagagctgtcctgacagcccactcactaatgcgtatgacgaacgcagtgacgaccacaaaactcgagcaacgagatcatgagccaatcaaagaggagtgatgtagacctaaagcaataatggagccatgacgtaagggcttacgcccatacgaaataattaaaggctgatgtgacctgtcggtctctcagaacctttactttttatgtttggcgtgtatttttaaatttccacggcaatgacgatgtgaccgtcgacccactaaaacattgctttgtcaaaagctaaaaaagatgatgcccgacagccacttgtgtgaagcatgagaagccggtccctccactaagaaaattagtgaagcatcttccagtggtccctccactcacagctcaatcagtgagcaacaggacgaaggaaatgacgtaagccatgacgtctaatcccagggcccggtgaccaatcgaattcttaccctagctccctgcggctgttacgcggtcccccatcaatcttctgttcttgcggttgtagcctgtgtaacagtgctagagtatgtatgataaataggttttaagtctgcttacatgacattttttattgtggaagagacatataaaaattagagagagtggttctcatgcaacggcggacggcccggtgctaaaagagcttcaagacaaaataatgaaacaggaagagagtagatttatctaagagccaactttattatatgaatgtgtttattgttggctttagatgatatggtaaggagttagagctaataatagataggctctattattattattattaattaaactcgctctaaggaggaaagtgggaggaagggacgaggacgaagactactggaagcatcgtgcatggatgatggatgtggtgtctcttaatgtaggtggccggaggatgtacgtgttaattgcgcgataagcactcagatccaaccgcaaactacctccacactgacacactgatagagagaaagagagacctccgacgactgccgccgcagatgagccacgtacgtatacgacgtctgccggccggctcaggctgccgccatcaccctgctcgaaagtcgcgttaggcggcgccagctacataggagtatctagtctagccagttagtatactactactgcgctgatgatgaattaactctgcatagatactgtacttgcctccctccaacacccaaccacctcctgctcggctcttaataacttggacacggatcgatgccatccaaggaagaacacgacgacgacgacggaacatccaccatgcaagcttgcatccatacgccgatacgcgtgcatccatccatccaccattatttccattttccaaacaacgtaagcgcttacgcaccgaacaacgtaagcgcttacgcaccgaacaacgtaagcgcttacgcacccgatcacacgtacacaggcctatttaaggagcgacatcccactgcaactctcctcaccactcatcaccagctagctctagcaaagcacttgccatctaccgaccgccgcattccaaacagcccgacgagctagcagagcggcaggcacctccctcctcaaggaacccatggcggccaatgcgggcggcggtggagcgggaggaggcagcggcagcggcagcgtggctgcgccggcggtgtgccgccccagcggctcgcggtggacgccgacgccggagcagatcaggatgctgaaggagctctactacggctgcggcatccggtcgcccagctcggagcagatccagcgcatcaccgccatgctgcggcagcacggcaagatcgagggcaagaacgtcttctactggttccagaaccacaaggcccgcgagcgccagaagcgccgcctcaccagcctcgacgtcaacgtgcccgccgccggcgcggccgacgccaccaccagccaactcggcgtcctctcgctgtcgtcgccgccgccttcaggcgcggcgcctccctcgcccaccctcggcttctacgccgccggcaatggcggcggatcggctgtgctgctggacacgagttccgactggggcagcagcggcgctgctatggccaccgagacatgcttcctgcaggactacatgggcgtgacggacacgggcagctcgtcgcagtggccacgcttctcgtcgtcggacacgataatggcggcggccgcggcgcgggcggcgacgacgcgggcgcccgagacgctccctctcttcccgacctgcggcgacgacggcggcagcggtagcagcagctacttgccgttctggggtgccgcgtccacaactgccggcgccacttcttccgttgcgatccaacagcaacaccagctgcaggagcagtacagcttttacagcaacagcaacagcacccagctggccggcaccggcaaccaagacgtatcggcaacagcagcagcagccgccgccctggagctgagcctcagctcatggtgctccccttaccctgctgcagggagtatgtgagagcaacgcgagctgccactgctcttcactgatgtctctggaatggaaggaggaggaagtgagaacagatcattcgacaaagcagcattagtccgttgatcggtggaagaccactcgtcagtgttgagttgaatgtttgatcaataaaatacggcaatgctgtaagggttgttttttatgccattgataatacactgtactgttcagttgttgaactctatttcttagccatgccaagtgcttttcttattttgaataacattacagcaaaaagttgaaagacaaaaaaaaaaacccccgaacagagtgctttgggtcccaagcttctttagactgtgttcggcgttccccctaaatttctccccctatatctcactcacttgtcacatcagcgttctctttccccctatatctccacgctctacagcagttccacctatatcaaacctctataccccaccacaacaatattatatactttcatcttcaactaactcatgtaccttccaatttttttctactaataattatttacgtgcacagaaacttagcaaggagagagagagcggggtcacccggtccgggcctagaaggccagcttcaagtttgtacaaaaaagcaggctccggccagaatggcccggaccgggttaccgaattcgagctcggtaccctgggatccgatatcgatgggccctggccgaagcttggtcacccggtccgggcctagaaggccgatctcccgggcacccagctttcttgtacaaagtggccgttaacggatcggccagaatggcccggaccgaagccgaggccggccacactgatagtttaaactgaaggcgggaaacgacaatctgatcatgagcggagaattaagggagtcacgttatgacccccgccgatgacgcgggacaagccgttttacgtttggaactgacagaaccgcaacgattgaaggagccactcagccgcgggtttctggagtttaatgagctaagcacatacgtcagaaaccattattgcgcgttcaaaagtcgcctaaggtcactatcagctagcaaatatttcttgtcaaaaatgctccactgacgttccataaattcccctcggtatccaattagagtctcatattcactctcccggcggatctcgactctagaggatcgctcaggaaggccgctgagatagagccatggggaggagggcgtgttgcgcgaaggaaggcgttaagagaggggcgtggacgagcaaggaggacgatgccttggccgcctacgtcaaggcccacggcgaaggcaaatggagggaagtgccccagaaagccggtttgcgtcggtgcggcaagagctgccggctgcggtggctgaactacctccggcccaacatcaggcgcggcaacatctcctacgacgaggaggatctcatcatccgcctccacaggctcctcggcaacaggtggtcgctgattgcaggcaggctgcctggccgaacagacaatgaaatcaagaactactggaacagcacgctgggccggagggcaggcgccggcgccggcgccggcggcagatccacgatggcgctttcagcttcccgagttcagcaggcggaagaactgctgcaacgacctgctgagaggcagctgatgaggagccagcttgctgcagccgccaggagcatcaactggagctacgccctcttctggtccatttcagacactcaaccaggggtgctgacgtggacggacgggttctacaacggcgaggtgaagacgcggaagatttccaactccgtggagctgacatccgaccagctcgtcatgcagaggagcgaccagctccgggagctctacgaggccctcctgtcgggcgagggcgaccgccgcgctgcgcctgcgcggccggccggctctctgtcgccggaggacctcggcgacaccgagtggtactacgtggtgtccatgacctacgccttccggccaggccaagggttgcccggcaggagtttcgcgagcgacgagcatgtctggctgtgcaacgcgcacctcgccggcagcaaagccttcccccgcgcgctcctcgccaagagcgcgtccattcagtcaatcctctgcatcccggttatgggcggcgtgcttgagcttggtacaactgacacggtgccggaggccccggacttggtcagccgagcaaccgcggctttctgggagccgcagtgcccgagctccagcccgtcaggacgagcaaacgagacgggcgaggccgcagcagacgacggcacgtttgcgttcgaggaactcgaccacaataatggcatggacgacatagaggcgatgaccgccgccgggggacacgggcaggaggaggagctaagactaagagaagccgaggccctgtcagacgacgcaagcctggagcacatcaccaaggagatcgaggagttctacagcctctgcgacgaaatggacctgcaggcgctaccactaccgctagaggacggctggaccgtggacgcgtccaatttcgaggtcccctgctcttccccgcagccagcgccgcctccggtggatagggctaccgctaacgtcgccgccgacgcctcaagggcacccgtctacggctctcgcgcgacgagtttcatggcttggacgaggtcctcgcagcagtcgtcgtgctccgacgacgcggcgcccgcagcagtagtgccggccatcgaggagccgcagagattgctgaagaaagtggtggccggcggcggtgcttgggagagctgtggcggcgcgacgggagcagcacaggaaatgagtggcactggcaccaagaaccacgtcatgtcggagcgaaagcgacgagagaagctcaacgagatgttcctcgtcctcaagtcactgcttccgtccattcacagggtgaacaaagcgtcgatcctcgccgaaacgatagcctacctcaaggagcttcagagaagggtgcaagagctggagtccagtagggaacctgcgtcgcgcccatccgaaacgacgacaaggctaataacaaggccctcccgtggcaataatgagagtgtgaggaaggaggtctgcgcgggctccaagaggaagagcccagagctcggcagagacgacgtggagcgccccccggtcctcacgatggacgccggcaccagcaacgtcaccgtcaccgtctcggacaaggatgtgctcctggaggtgcagtgccggtgggaggagctcctgatgacgcgagtgttcgacgccatcaagagcctccatttggacgtcctctcggttcaggcttcagcgccagatggcttcatggggcttaagatacgagctcagtttgctggctccggtgccgtcgtgccctggatgatcagcgaggctcttcgcaaagctatagggaacccctgggtcgtcgtcgcgccggacaccggctcgcacgccaccccggccgcgacgtcgggcgcctgcgagacgggccagaatagcgccgctcatcgcgcggaccccgactcagccgggacgacgacgacctcggcggcggcggtgtgggcgcccaaggccgtgcggtgcacgggcggactcttcttcttccaccgggacacgacgccggcgcacgcgggcgagacggcgacgccaatggccggtggaggtggaggaggaggaggagaagcagggtcgtcggacgactgcagctcggcggcgtcggtatcgcttcgcgtcggaagccacgacgagccgtgcttctccggcgacggtgacggcgactggatggacgacgtgagggccctggcgtcgtttctggagtccgacgaggactggctccgctgtcagacggccgggcagcttgcgtagtggccaggtaccactaactatctatactgtaataatgttgtatagccgccggatagctagctagtttagtcattcagcggcgatgggtaataataaagtgtcatccatccatcaccatgcgtggcaacgtgagcaatgacctgattgaacaaattgaaatgaaaagaagaaatatgttatatgtcaacgagatttcctcataatgccactgacgacgtgtgtccaagaaatgtatcagtgatacgtatattcacaatttttttatgacttatactcacaatttgtttttttactacttatactcacaatttgttgtgcgtaccataacaatttcgatcgaatatatatcagaaagttgacgaaagtaagctcactcaaaaagttaaatgggctgcggaagctgcgtcaggcccaagttttggctattctatccggtatccacgattttgatggctgagggacatatgttcgcttaagcttggcgcgccggtcacccggtccgggcctagaaggccagcttcggccgccccgggcaactttattatacaaagttgatagataaatcagatatctggttcctaaggacccggcggaccgattaaactgattcggtccgacgcgttacctaataacttcgtatagcatacattatacgaagttattagctaactaactagtaagcttaagccatgggtcgacggatccgttacctgagctgattccgatgacttcgtaggttcctagctcaagccgctcgtgtccaagcgtcacttacgattagctaatgattacggcatctaggaccgactagctaactaactagtacgtacgcgccgactagctagctaaggtaccgagctcgaattcattccgattaatcgtggcctcttgctcttcaggatgaagagctatgtttaaacgtgcaagcgctactagacaattcagtacattaaaaacgtccgcaatgtgttattaagttgtctaagcgtcaatttgtttacaccacaatatatcctgcca

SEQ ID NO: 57 - DNA, 19 bp, Escherichia coli
actctatcagtgatagagt

SEQ ID NO: 58 - DNA, 1402 bp, Cauliflower mosaic virus
gatccaattccaatcccacaaaaatctgagcttaacagcacagttgctcctctcagagcagaatcgggtattcaacaccctcatatcaactactacgttgtgtataacggtccacatgccggtatatacgatgactggggttgtacaaaggcggcaacaaacggcgttcccggagttgcacacaagaaatttgccactattacagaggcaagagcagcagctgacgcgtacacaacaagtcagcaaacagacaggttgaacttcatccccaaaggagaagctcaactcaagcccaagagctttgctaaggccctaacaagcccaccaaagcaaaaagcccactggctcacgctaggaaccaaaaggcccagcagtgatccagccccaaaagagatctcctttgccccggagattacaatggacgatttcctctatctttacgatctaggaaggaagttcgaaggtgaaggtgacgacactatgttcaccactgataatgagaaggttagcctcttcaatttcagaaagaatgctgacccacagatggttagagaggcctacgcagcaggtctcatcaagacgatctacccgagtaacaatctccaggagatcaaataccttcccaagaaggttaaagatgcagtcaaaagattcaggactaattgcatcaagaacacagagaaagacatatttctcaagatcagaagtactattccagtatggacgattcaaggcttgcttcataaaccaaggcaagtaatagagattggagtctctaaaaaggtagttcctactgaatctaaggccatgcatggagtctaagattcaaatcgaggatctaacagaactcgccgtgaagactggcgaacagttcatacagagtcttttacgactcaatgacaagaagaaaatcttcgtcaacatggtggagcacgacactctggtctactccaaaaatgtcaaagatacagtctcagaagaccaaagggctattgagacttttcaacaaaggataatttcgggaaacctcctcggattccattgcccagctatctgtcacttcatcgaaaggacagtagaaaaggaaggtggctcctacaaatgccatcattgcgataaaggaaaggctatcattcaagatgcctctgccgacagtggtcccaaagatggacccccacccacgaggagcatcgtggaaaaagaagacgttccaaccacgtcttcaaagcaagtggattgatgtgacatctccactgacgtaagggatgacgcacaatcccactatccttcgcaagacccttcctctatataaggaagttcatttcatttggagaggacacgctcgagctcatttctctattacttcagccataacaaaagaactcttttctcttcttattaa

SEQ ID NO: 59 - DNA, 645 bp, Artificial Sequence
  TET REP (MOD1)
atggccagactcgacaagagcaaggtgatcaacagcgcactggagctgctgaacgaggtcggaatcgaaggcctcacaacccgtaaactcgcccagaagctcggggtagagcagcctacattgtattggcacgtcaagaacaagcgggctttgctagacgccctcgccattgagatgctcgataggcaccatacccacttctgccctttggaaggggaaagctggcaagacttcttgaggaacaacgctaagagcttcagatgtgctttgctcagtcaccgtgatggagccaaggtccacctaggtacacggcctacggagaagcagtatgaaactctcgagaaccagctcgccttcctgtgccaacaaggtttctcccttgagaatgccctctacgcactctccgctgtagggcacttcactctgggttgcgtattggaagatcaagagcaccaagtcgctaaggaggagagggaaacacctactactgatagtatgccgccactgctccgacaagctatcgagctcttcgatcaccaaggtgcagagccagccttcctgttcggccttgaattgatcatatgcggattggagaagcagctgaagtgtgaaagtgggtctttgaccctcctgctgttccgctag

SEQ ID NO: 60 - protein, 214 aa, Artificial Sequence
  TET REP (MOD1)
MARLDKSKVINSALELLNEVGIEGLTTRKLAQKLGVEQPTLYWHVKNKRALLDALAIEMLDRHHTHFCPLEGESWQDFLRNNAKSFRCALLSHRDGAKVHLGTRPTEKQYETLENQLAFLCQQGFSLENALYALSAVGHFTLGCVLEDQEHQVAKEERETPTTDSMPPLLRQAIELFDHQGAEPAFLFGLELIICGLEKQLKCESGSLTLLLFR

SEQ ID NO: 61 - DNA, 2133 bp, Zea mays
atggccactgtgaacaactggctcgctttctccctctccccgcaggagctgccgccctcccagacgacggactccacactcatctcggccgccaccgccgaccatgtctccggcgatgtctgcttcaacatcccccaagattggagcatgaggggatcagagctttcggcgctcgtcgcggagccgaagctggaggacttcctcggcggcatctccttctccgagcagcatcacaaggccaactgcaacatgatacccagcactagcagcacagtttgctacgcgagctcaggtgctagcaccggctaccatcaccagctgtaccaccagcccaccagctcagcgctccacttcgcggactccgtaatggtggcctcctcggccggtgtccacgacggcggtgccatgctcagcgcggccgccgctaacggtgtcgctggcgctgccagtgccaacggcggcggcatcgggctgtccatgattaagaactggctgcggagccaaccggcgcccatgcagccgagggtggcggcggctgagggcgcgcaggggctctctttgtccatgaacatggcggggacgacccaaggcgctgctggcatgccacttctcgctggagagcgcgcacgggcgcccgagagtgtatcgacgtcagcacagggtggagccgtcgtcgtcacggcgccgaaggaggatagcggtggcagcggtgttgccggcgctctagtagccgtgagcacggacacgggtggcagcggcggcgcgtcggctgacaacacggcaaggaagacggtggacacgttcgggcagcgcacgtcgatttaccgtggcgtgacaaggcatagatggactgggagatatgaggcacatctttgggataacagttgcagaagggaagggcaaactcgtaagggtcgtcaagtctatttaggtggctatgataaagaggagaaagctgctagggcttatgatcttgctgctctgaagtactggggtgccacaacaacaacaaattttccagtgagtaactacgaaaaggagctcgaggacatgaagcacatgacaaggcaggagtttgtagcgtctctgagaaggaagagcagtggtttctccagaggtgcatccatttacaggggagtgactaggcatcaccaacatggaagatggcaagcacggattggacgagttgcagggaacaaggatctttacttgggcaccttcagcacccaggaggaggcagcggaggcgtacgacatcgcggcgatcaagttccgcggcctcaacgccgtcaccaacttcgacatgagccgctacgacgtgaagagcatcctggacagcagcgccctccccatcggcagcgccgccaagcgcctcaaggaggccgaggccgcagcgtccgcgcagcaccaccacgccggcgtggtgagctacgacgtcggccgcatcgcctcgcagctcggcgacggcggagccctggcggcggcgtacggcgcgcactaccacggcgccgcctggccgaccatcgcgttccagccgggcgccgccagcacaggcctgtaccacccgtacgcgcagcagccaatgcgcggcggcgggtggtgcaagcaggagcaggaccacgcggtgatcgcggccgcgcacagcctgcaggacctccaccacctgaacctgggcgcggccggcgcgcacgactttttctcggcagggcagcaggccgccgccgctgcgatgcacggcctgggtagcatcgacagtgcgtcgctcgagcacagcaccggctccaactccgtcgtctacaacggcggggtcggcgacagcaacggcgccagcgccgtcggcggcagtggcggtggctacatgatgccgatgagcgctgccggagcaaccactacatcggcaatggtgagccacgagcaggtgcatgcacgggcctacgacgaagccaagcaggctgctcagatggggtacgagagctacctggtgaacgcggagaacaatggtggcggaaggatgtctgcatgggggactgtcgtgtctgcagccgcggcggcagcagcaagcagcaacgacaacatggccgccgacgtcggccatggcggcgcgcagctcttcagtgtctggaacgacacttaa

SEQ ID NO: 62 - protein, 405 aa, Zea mays
MDTFGQRTSIYRGVTRHRWTGRYEAHLWDNSCRREGQTRKGRQVYLGGYDKEEKAARAYDLAALKYWGATTTTNFPVSNYEKELEDMKHMTRQEFVASLRRKSSGFSRGASIYRGVTRHHQHGRWQARIGRVAGNKDLYLGTFSTQEEAAEAYDIAAIKFRGLNAVTNFDMSRYDVKSILDSSALPIGSAAKRLKEAEAAASAQHHHAGVVSYDVGRIASQLGDGGALAAAYGAHYHGAAWPTIAFQPGAASTGLYHPYAQQPMRGGGWCKQEQDHAVIAAAHSLQDLHHLNLGAAGAHDFFSAGQQAAAAAMHGLGSIDSASLEHSTGSNSVVYNGGVGDSNGASAVGGSGGGYMMPMSAAGATTTSAMVSHEQVHARAYDEAKQAAQMGYESYLVNAENNGGG

SEQ ID NO: 63 - DNA, 2079 bp, Oryza sativa
atggccaccatgaacaactggctggccttctccctctccccgcaggatcagctcccgccgtctcagaccaactccactctcatctccgccgccgccaccaccaccaccgccggcgactcctccaccggcgacgtctgcttcaacatcccccaagattggagcatgaggggatcggagctctcggcgctcgtcgccgagccgaagctggaggacttcctcggcggcatctccttctcggagcagcagcatcatcacggcggcaagggcggcgtgatcccgagcagcgccgccgcttgctacgcgagctccggcagcagcgtcggctacctgtaccctcctccaagctcatcctcgctccagttcgccgactccgtcatggtggccacctcctcgcccgtcgtcgcccacgacggcgtcagcggcggcggcatggtgagcgccgccgccgccgcggcggccagtggcaacggcggcattggcctgtccatgatcaagaactggctccggagccagccggcgccgcagccggcgcaggcgctgtctctgtccatgaacatggcggggacgacgacggcgcagggcggcggcgccatggcgctcctcgccggcgcaggggagcgaggccggacgacgcccgcgtcagagagcctgtccacgtcggcgcacggagcgacgacggcgacgatggctggtggtcgcaaggagattaacgaggaaggcagcggcagcgccggcgccgtggttgccgtcggctcggagtcaggcggcagcggcgccgtggtggaggccggcgcggcggcggcggcggcgaggaagtccgtcgacacgttcggccagagaacatcgatctaccgcggcgtgacaaggcatagatggacagggaggtatgaggctcatctttgggacaacagctgcagaagagagggccaaactcgcaagggtcgtcaaggtggttatgacaaagaggaaaaagctgctagagcttatgatttggctgctctcaaatactggggcccgacgacgacgacaaattttccggtaaataactatgaaaaggagctggaggagatgaagcacatgacaaggcaggagttcgtagcctctttgagaaggaagagcagtggtttctccagaggtgcatccatttaccgtggagtaactaggcatcaccagcatgggagatggcaagcaaggataggaagagttgcagggaacaaggacctctacttgggcaccttcagcacgcaggaggaggcggcggaggcgtacgacatcgcggcgatcaagttccgggggctcaacgccgtcaccaacttcgacatgagccgctacgacgtcaagagcatcctcgacagcgctgccctccccgtcggcaccgccgccaagcgcctcaaggacgccgaggccgccgccgcctacgacgtcggccgcatcgcctcgcacctcggcggcgacggcgcctacgccgcgcattacggccaccaccaccactcggccgccgccgcctggccgaccatcgcgttccaggcggcggcggcgccgccgccgcacgccgccgggctttaccacccgtacgcgcagccgctgcgtgggtggtgcaagcaggagcaggaccacgccgtgatcgcggcggcgcacagcctgcaggatctccaccacctcaacctcggcgccgccgccgccgcgcatgacttcttctcgcaggcgatgcagcagcagcacggcctcggcagcatcgacaacgcgtcgctcgagcacagcaccggctccaactccgtcgtctacaacggcgacaatggcggcggaggcggcggctacatcatggcgccgatgagcgccgtgtcggccacggccaccgcggtggcgagcagccacgatcacggcggcgacggcgggaagcaggtgcagatggggtacgacagctacctcgtcggcgcagacgcctacggcggcggcggcgccgggaggatgccatcctgggcgatgacgccggcgtcggcgccggccgccacgagcagcagcgacatgaccggagtctgccatggcgcacagctcttcagcgtctggaacgacacataa

SEQ ID NO: 64 - protein, 692 aa, Oryza sativa
MATMNNWLAFSLSPQDQLPPSQTNSTLISAAATTTTAGDSSTGDVCFNIPQDWSMRGSELSALVAEPKLEDFLGGISFSEQQHHHGGKGGVIPSSAAACYASSGSSVGYLYPPPSSSSLQFADSVMVATSSPVVAHDGVSGGGMVSAAAAAAASGNGGIGLSMIKNWLRSQPAPQPAQALSLSMNMAGTTTAQGGGAMALLAGAGERGRTTPASESLSTSAHGATTATMAGGRKEINEEGSGSAGAVVAVGSESGGSGAVVEAGAAAAAARKSVDTFGQRTSIYRGVTRHRWTGRYEAHLWDNSCRREGQTRKGRQGGYDKEEKAARAYDLAALKYWGPTTTTNFPVNNYEKELEEMKHMTRQEFVASLRRKSSGFSRGASIYRGVTRHHQHGRWQARIGRVAGNKDLYLGTFSTQEEAAEAYDIAAIKFRGLNAVTNFDMSRYDVKSILDSAALPVGTAAKRLKDAEAAAAYDVGRIASHLGGDGAYAAHYGHHHHSAAAAWPTIAFQAAAAPPPHAAGLYHPYAQPLRGWCKQEQDHAVIAAAHSLQDLHHLNLGAAAAAHDFFSQAMQQQHGLGSIDNASLEHSTGSNSVVYNGDNGGGGGGYIMAPMSAVSATATAVASSHDHGGDGGKQVQMGYDSYLVGADAYGGGGAGRMPSWAMTPASAPAATSSSDMTGVCHGAQLFSVWNDT

SEQ ID NO: 65 - DNA, 1794 bp, Oryza sativa
atggccaccatgaacaactggctggccttctccctctccccgcaggatcagctcccgccgtctcagaccaactccactttcatctccgccgccgccaccaccaccaccgccggcgactcctccaccggcgacgtctgcttcaacatcccccaagctcacccctccacgccggccattggcaacggcggcattggcctgtccatgatcaagaactggctccggagccagccggcgccgcagccggcgcaggcgctgtctctgtccatgaacatggcggggacgacgacggcgcagggcggcggcgccatggcgctcctcgccggcgcaggggagcgaggccggacgacgcccgcgtcagagagcctgtccacgtcggcgcacggagcgacgacggcgacgatggctggtggtcgcaaggagattaacgaggaaggcagcggcagcgccggcgccgtggttgccgtcggctcggagtcaggcggcagcggcgccgtggtggaggccggcgcggcggcggcggcggcgaggaagtccgtcgacacgttcggccagagaacatcgatctaccgcggcgtgacaaggcatagatggacagggaggtatgaggctcatctttgggacaacagctgcagaagagagggccaaactcgcaagggtcgtcaaggtggttatgacaaagaggaaaaagctgctagagcttatgatttggctgctctcaaatactggggcccgacgacgacgacaaattttccggtaaataactatgaaaaggagctggaggagatgaagcacatgacaaggcaggagttcgtagcctctttgagaaggaagagcagtggtttctccagaggtgcatccatttaccgtggagtaactaggcatcaccagcatgggagatggcaagcaaggataggaagagttgcagggaacaaggacctctacttgggcaccttcagcacgcaggaggaggcggcggaggcgtacgacatcgcggcgatcaagttccgggggctcaacgccgtcaccaacttcgacatgagccgctacgacgtcaagagcatcctcgacagcgctgccctccccgtcggcaccgccgccaagcgcctcaaggacgccgaggccgccgccgcctacgacgtcggccgcatcgcctcgcacctcggcggcgacggcgcctacgccgcgcattacggccaccaccaccactcggccgccgccgcctggccgaccatcgcgttccaggcggcggcggcgccgccgccgcacgccgccgggctttaccacccgtacgcgcagccgctgcgtgggtggtgcaagcaggagcaggaccacgccgtgatcgcggcggcgcacagcctgcaggatctccaccacctcaacctcggcgccgccgccgccgcgcatgacttcttctcgcaggcgatgcagcagcagcacggcctcggcagcatcgacaacgcgtcgctcgagcacagcaccggctccaactccgtcgtctacaacggcgacaatggcggcggaggcggcggctacatcatggcgccgatgagcgccgtgtcggccacggccaccgcggtggcgagcagccacgatcacggcggcgacggcgggaagcaggtgcagatggggtacgacagctacctcgtcggcgcagacgcctacggcggcggcggcgccgggaggatgccatcctgggcgatgacgccggcgtcggcgccggccgccacgagcagcagcgacatgaccggagtctgccatggcgcacagctcttcagcgtctggaacgacacataa

SEQ ID NO: 66 - protein, 597 aa, Oryza sativa
MATMNNWLAFSLSPQDQLPPSQTNSTFISAAATTTTAGDSSTGDVCFNIPQAHPSTPAIGNGGIGLSMIKNWLRSQPAPQPAQALSLSMNMAGTTTAQGGGAMALLAGAGERGRTTPASESLSTSAHGATTATMAGGRKEINEEGSGSAGAVVAVGSESGGSGAVVEAGAAAAAARKSVDTFGQRTSIYRGVTRHRWTGRYEAHLWDNSCRREGQTRKGRQGGYDKEEKAARAYDLAALKYWGPTTTTNFPVNNYEKELEEMKHMTRQEFVASLRRKSSGFSRGASIYRGVTRHHQHGRWQARIGRVAGNKDLYLGTFSTQEEAAEAYDIAAIKFRGLNAVTNFDMSRYDVKSILDSAALPVGTAAKRLKDAEAAAAYDVGRIASHLGGDGAYAAHYGHHHHSAAAAWPTIAFQAAAAPPPHAAGLYHPYAQPLRGWCKQEQDHAVIAAAHSLQDLHHLNLGAAAAAHDFFSQAMQQQHGLGSIDNASLEHSTGSNSVVYNGDNGGGGGGYIMAPMSAVSATATAVASSHDHGGDGGKQVQMGYDSYLVGADAYGGGGAGRMPSWAMTPASAPAATSSSDMTGVCHGAQLFSVWNDT

SEQ ID NO: 67 - DNA, 29702 bp, Artificial Sequence
  RV044484
gtttacccgccaatatatcctgtcaaacactgatagtttaaactgaaggcgggaaacgacaatctgatcatgagcggagaattaagggagtcacgttatgacccccgccgatgacgcgggacaagccgttttacgtttggaactgacagaaccgcaacgttgaaggagccactcagcaagctggtacgattgtaatacgactcactatagggcgaattgagcgctgtttaaacgctcttcaactggaagagcggttacgctgtttaaacgctcttcaactggaagagcggttactaccggttcactagctagctgctaatcgagctagttaccctatgaggtgacatgaagcgctcacggttactatgacggttagcttcacgactgttggtggcagtagcgtacgacttagctatagttccggacttacccttaagcgatttaaatctgcggttaccgaattcgagctcggtaccctgggatctgcccttactttaacgcctctaaccaacacccctttatctttataaggaacaataaacagaatttgccccactgttctaaatcacctaataatatccccagctaaaaacaataaaggtttcctagaattaagacaagcatgactgttcctccaggagggtttggaacattgttgcagtcttgcagatacgggcgaagggtgagaaacagagcggagggctggaggtgacctcggtagtcgacgccggagttgagcttgacaacgacggggcggcccctgatggacttgaggaagtccgatggcgtcttcaccgtcccgccggcgcccgaggcgggcctgtcgctgccgccgccgccgctgctcatcttgcgcgctgtgcccccggcggtgtccctgtgttgcggatcgcgggtgggccaggtggatgcgagggcgacccgtttggactccggccggagccgccggatccctggtcggtgtcagtgccgtttactctgggccccacgtgtcagtaccgtctgtagatgacaacaacccgtcgtccacagtcatgtccaaaatatcctttcttcttttttttcgattcggatatctatcttccttttttttttccaaaaatcttcttgacgcaccagcgcgcacgtttgtggtaaacgccgacacgtcggtcccacgtcgatagaccccacccaccagtgagtagcgtgtacgtattcgggggtgacggacgtgtcgccgtcgtcttgctagtcccattcccatctgagccacacatctctgaacaaaaaaaaggagggaggcctccacgcacatccccctccgtgccacccgccccaaaccctcgcgccgcctccgagacagccgccgcaaccatggccaccgccgccgccgcgtctaccgcgctcactggcgccactaccgctgcgcccaaggcgaggcgccgggcgcacctcctggccacccgccgcgccctcgccgcgcccatcaggtgctcagcggcgtcacccgccatgccgatggctcccccggccaccccgctccggccgtggggccccaccgagccccgcaagggtgctgacatcctcgtcgagtccctcgagcgctgcggcgtccgcgacgtaagtttctgcttctacctttgatatatatataataattatcattaattagtagtaatataatatttcaaatatttttttcaaaataaaagaatgtagtatatagcaattgcttttctgtagtttataacttcgtatagcatacattatacgaagttatacttttctaatatatgaccaaaatttgttaccgaattcaggcgacccatcgctgctttgtctacatcatgttcttcatcatcctccccaggcgacgcgtgctgctgttcttattcagactaccgttcgagtgactgcatggcgtacatctttctgcatcgactttgtacggctacatcgaacatatacacgagatgtctcgtgtgaatagagtcactaatgccttaagcatcggttactccgtagggtacattctgttcttcttatttgtgcatatttttattgttgtttactgattatacgagtagttatacatacatgcacatacatatcatcacatatatcacaatatttttctaaattaaattaaaactaaaaatgactaaatttctaacaccaacgacattgtaatgttttctccaacaactttacctattctacattgttctatttcgaatttcactctataaacaacatagtctacaatggaaaacagtgctttgtacgactatatacgcgatgtgtggctacaacataagacaatatagtcgtttgaagattgaacctatatatcggtacggttaatccgtctatgtacgtgggcatgacgaacacccgtgataacgaaggattaacgtgcacaatcataaatccaaagtaggagcggtgcatgatgagaatcgctctcagtactcgacataatgaaccttacgaggtacaacaggcaggcaggcagggaccaggggccgcctttatttcaggctcgctggccccacgggcgtgctgcgtgcacgaagggcactaccccaacctctcaccgaaaaccgcgctggatcggcaaatcaaacgaggtggtgccccgtgcccactctccacgtccacggcaccatccctctgcagccgctcaccagccatgccgtgtcgcggaacggcacaaccacccccaacccactcacgaaaccccgtcccggccgtgcccgtgtcggtccgcgctcggcaacgaggcggcccgcgctgctgagtcccctggacacccgacaccctgtcggccctttgtttattcatcccgaaatctcatctgcccccacggccgactgcgctgcgccgcccggatatatatacccatcgttatcgatcgactggggactctatcagtgatagagtctagaggatcgctcaggaaggccgctgagatagaggcatggcggccaatgcgggcggcggtggagcgggaggaggcagcggcagcggcagcgtggctgcgccggcggtgtgccgccccagcggctcgcggtggacgccgacgccggagcagatcaggatgctgaaggagctctactacggctgcggcatccggtcgcccagctcggagcagatccagcgcatcaccgccatgctgcggcagcacggcaagatcgagggcaagaacgtcttctactggttccagaaccacaaggcccgcgagcgccagaagcgccgcctcaccagcctcgacgtcaacgtgcccgccgccggcgcggccgacgccaccaccagccaactcggcgtcctctcgctgtcgtcgccgccgccttcaggcgcggcgcctccctcgcccaccctcggcttctacgccgccggcaatggcggcggatcggctgtgctgctggacacgagttccgactggggcagcagcggcgctgccatggccaccgagacatgcttcctgcaggactacatgggcgtgacggacacgggcagctcgtcgcagtggccacgcttctcgtcgtcggacacgataatggcggcggccgcggcgcgggcggcgacgacgcgggcgcccgagacgctccctctcttcccgacctgcggcgacgacggcggcagcggtagcagcagctacttgccgttctggggtgccgcgtccacaactgccggcgccacttcttccgttgcgatccagcagcaacaccagctgcaggagcagtacagcttttacagcaacagcaacagcacccagctggccggcaccggcaaccaagacgtatcggcaacagcagcagcagccgccgccctggagctgagcctcagctcatggtgctccccttaccctgctgcagggagtatgtgagagcaacgcgagctgccactgctcttcactggtaccgttaacagatcattcgacaaagcagcattagtccgttgatcggtggaagaccactcgtcagtgttgagttgaatgtttgatcaataaaatacggcaatgctgtaagggttgttttttatgccattgataatacactgtactgttcagttgttgaactctatttcttagccatgccaagtgcttttcttattttgaataacattacagcaaaaagttgaaagacaaaaaaaaaaacccccgaacagagtgctttgggtcccaagcttctttagactgtgttcggcgttccccctaaatttctccccctatatctcactcacttgtcacatcagcgttctctttccccctatatctccacgctctacagcagttccacctatatcaaacctctataccccaccacaacaatattatatactttcatcttcaactaactcatgtaccttccaatttttttctactaataattatttacgtgcacagaaacttagcaaggagagagagagcggggtgacccaccttgctagttggatattacctcttctcttcaaagtatccttgaacgctcaccggttatcaaatctctacactatagctctgtagtcttgctagatagttagttctttagctctcggtgaccaagcttggcgcgatcaagcttatcgataccgtcgacctcgaagcttggtcacccggtccgggcctagaaggccagcttcaagtttgtacaaaaaagcaggctccggccagaatggcccggaccgggttaccgaattcttaccctagctccctgcggctgttacgcggtcccccatcaatcttctgttcttgcggttgtagcctgtgtaacagtgctagagtatgtatgataaataggttttaagtctgcttacatgacattttttattgtggaagagacatataaaaattagagagagtggttctcatgcaacggcggacggcccggtgctaaaagagcttcaagacaaaataatgaaacaggaagagagtagatttatctaagagccaactttattatatgaatgtgtttattgttggctttagatgatatggtaaggagttagagctaataatagataggctctattattattattattaattaaactcgctctaaggaggaaagtgggaggaagggacgaggacgaagactactggaagcatcgtgcatggatgatggatgtggtgtctcttaatgtaggtggccggaggatgtacgtgttaattgcgcgataagcactcagatccaaccgcaaactacctccacactgacacactgatagagagaaagagagacctccgacgactgccgccgcagatgagccacgtacgtatacgacgtctgccggccggctcaggctgccgccatcaccctgctcgaaagtcgcgttaggcggcgccagctacataggagtatctagtctagccagttagtatactactactgcgctgatgatgaattaactctgcatagatactgtacttgcctccctccaacacccaaccacctcctgctcggctcttaataacttggacacggatcgatgccatccaaggaagaacacgacgacgacgacggaacatccaccatgcaagcttgcatccatacgccgatacgcgtgcatccatccatccaccattatttccattttccaccgatcacacgtacacaggcctatttaaggagcgacatcccactgcaactctcctcaccactcatcaccagctagctctagcaaagcacttgccatctaccgaccgccgcattccaaacagcccgacgagctagcagagcggcaggcacctccctcctcaaggaacccatggccactgtgaacaactggctcgctttctccctctccccgcaggagctgccgccctcccagacgacggactccacactcatctcggccgccaccgccgaccatgtctccggcgatgtctgcttcaacatcccccaagattggagcatgaggggatcagagctttcggcgctcgtcgcggagccgaagctggaggacttcctcggcggcatctccttctccgagcagcatcacaaggccaactgcaacatgatacccagcactagcagcacagtttgctacgcgagctcaggtgctagcaccggctaccatcaccagctgtaccaccagcccaccagctcagcgctccacttcgcggactccgtaatggtggcttcctcggccggtgtccacgacggcggtgccatgctcagcgcggccgccgctaacggtgtcgctggcgctgccagtgccaacggcggcggcatcgggctgtccatgattaagaactggctgcggagccaaccggcgcccatgcagccgagggtggcggcggctgagggcgcgcaggggctctctttgtccatgaacatggcggggacgacccaaggcgctgctggcatgccacttctcgctggagagcgcgcacgggcgcccgagagtgtatcgacgtcagcacagggtggagccgtcgtcgtcacggcgccgaaggaggatagcggtggcagcggtgttgccggcgctctagtagccgtgagcacggacacgggtggcagcggcggcgcgtcggctgacaacacggcaaggaagacggtggacacgttcgggcagcgcacgtcgatttaccgtggcgtgacaaggcatagatggactgggagatatgaggcacatctttgggataacagttgcagaagggaagggcaaactcgtaagggtcgtcaagtctatttaggtggctatgataaagaggagaaagctgctagggcttatgatcttgctgctctgaagtactggggtgccacaacaacaacaaattttccagtgagtaactacgaaaaggagctcgaggacatgaagcacatgacaaggcaggagtttgtagcgtctctgagaaggaagagcagtggtttctccagaggtgcatccatttacaggggagtgactaggcatcaccaacatggaagatggcaagcacggattggacgagttgcagggaacaaggatctttacttgggcaccttcagcacccaggaggaggcagcggaggcgtacgacatcgcggcgatcaagttccgcggcctcaacgccgtcaccaacttcgacatgagccgctacgacgtgaagagcatcctggacagcagcgccctccccatcggcagcgccgccaagcgcctcaaggaggccgaggccgcagcgtccgcgcagcaccaccacgccggcgtggtgagctacgacgtcggccgcatcgcctcgcagctcggcgacggcggagccctggcggcggcgtacggcgcgcactaccacggcgccgcctggccgaccatcgcgttccagccgggcgccgccagcacaggcctgtaccacccgtacgcgcagcagccaatgcgcggcggcgggtggtgcaagcaggagcaggaccacgcggtgatcgcggccgcgcacagcctgcaggacctccaccacctgaacctgggcgcggccggcgcgcacgactttttctcggcagggcagcaggccgccgccgctgcgatgcacggcctgggtagcatcgacagtgcgtcgctcgagcacagcaccggctccaactccgtcgtctacaacggcggggtcggcgacagcaacggcgccagcgccgtcggcggcagtggcggtggctacatgatgccgatgagcgctgccggagcaaccactacatcggcaatggtgagccacgagcaggtgcatgcacgggcctacgacgaagccaagcaggctgctcagatggggtacgagagctacctggtgaacgcggagaacaatggtggcggaaggatgtctgcatgggggactgtcgtgtctgcagccgcggcggcagcagcaagcagcaacgacaacatggccgccgacgtcgggcatggcggcgcgcagctcttcagtgtctggaacgacacttaagcgtacctagtggtacctgacatcttatagtctgcaacctctcgtgtctgaattcctatctttatcaagtgttattgcttccacgactataggacagctttcgtcgaaagcttttgctcatgtgatctcgaaggattcatctagtctgatttttcgtgacttgtatcggttttattggattcatccaacatatatcaataaaaaatgagttgtgtttcctttcttcctagttcagttaaaattatttccctcctgcgcttgtgctgtaattgtctgtgtacctgttgtttgtgactgtgttagttcccttggatatgatttcgtatttgatatgtacatggagatagcttagcttcattattggagtatgaagttagtatgacatagtcactctcctggaaaattgacactgcaaaccatatttttattctgaaccacaaatcctagtcagtccgctggcatatgccgtccgtttgctgaatccagaacgtgggtttggagatgtacggctgagatgcctctatgcgaaggggatttcgtggtgaaacgagatgggagtagagcaacgcccgtggaagatgcttcaaacttccacacttttgagcaacgatcggcagtagtaaggtagacgatttcaagatcaaagcatatgaagataaacaacatcaacaacaaaatttgttggggttctatagagagaaacagagctacatacatacactgttttgtatctaccatctgagatgatgaaaagatgaaaaactaaagaatgccccggcgccaacgccaggacacgccgcgcgcgcgtcacccgagccatctcttgacccagccggcgctgtatatttacacacgttgcagcatcgatcaccacctgttcgatcgcgtcgccgtcaccgggatctgagtcgaaacctagacttgtccatcttctggattggccaacttaattaatgtatgaaataaaaggatgcacacatagtgacatgctaatcactataatgtgggcatcaaagttgtgtgttatgtgtaattactagttatctgaataaaagagaaagagatcatccatatttcttatcctaaatgaatgtcacgtgtctttataattctttgatgaaccagatgcatttcattaaccaaatccatatacatataaatattaatcatatataattaatatcaattgggttagcaaaacaaatctagtctaggtgtgttttgcgaatgcgaccttcttatgtgcttctagtctccaaatgtggttgatagttattttgctctaagatcaacagtaatgaagtataaatcatcgttgtggtgtgctactcggttaattgagcattaacacacacaaacatgacgaggatggtataatctccaaaaatgtgtactttgttaggtgggaccctatagccttgattaatgtgctatgttaggcatgcctggaaacgtgtgacgcatatgttttgtgaacctgttgatattatatgtgcttttatattaccatattttattaaaatactaatatttattactagtaagatataacattctatctagcttaaaaactaaccataaatattccataataactagatttaccaaactaatatactaaatatacataataaatacaaaattaacaagacaataatcaatatttatgagcttaatatatttagacattatggttggtcgacgataatcatgctaacttttcgtaattgcttgattgaaatatgcttagaataatgcctctttgttctacatggcaaatagggaccattatggtgtaacaccctgggaaccacaaacaccccgaaatgctactaaactacacaactaaccttcatatataaaatttcgacagcatctcctttgaaaatttgcatagacgtggaagcaacagagtataaacagatatcatgataagaaaacatactagacattaataatctgctagaaatgggaagaatcctaacttgacgactgcgtaactgactagagtcacacttagctgaccctagtcacttacaactgacttcgtgtcctagatcgatgggccctggccgaagcttggtcacccggtccgggcctagaaggccagcttcaagtttgtaccctggagcttgccgagtgccatccttggacactcgataaagtatattttattttttttattttgccaaccaaactttttgtggtatgttcctacactatgtagatctacatgtaccattttggcacaattacatatttacaaaaatgttttctataaatattagatttagttcgtttatttgaatttcttcggaaaattcacatttaaactgcaagtcactcgaaacatggaaaaccgtgcatgcaaaataaatgatatgcatgttatctagcacaagttacgaccgatttcagaagcagaccagaatcttcaagcaccatgctcactaaacatgaccgtgaacttgttatctagttgtttaaaaattgtataaaacacaaataaagtcagaaattaatgaaacttgtccacatgtcatgatatcatatatagaggttgtgataaaaatttgataatgtttcggtaaagttgtgacgtactatgtgtagaaacctaagtgacctacacataaaatcatagagtttcaatgtagttcactcgacaaagactttgtcaagtgtccgataaaaagtactcgacaaagaagccgttgtcgatgtactgttcgtcgagatctctttgtcgagtgtcacactaggcaaagtctttacggagtgtttttcaggctttgacactcggcaaagcgctcgattccagtagtgacagtaatttgcatcaaaaatagctgagagatttaggccccgtttcaatctcacgggataaagtttagcttcctgctaaactttagctatatgaattgaagtgctaaagtttagtttcaattaccaccattagctctcctgtttagattacaaatggctaaaagtagctaaaaaatagctgctaaagtttatctcgcgagattgaaacagggccttaaaatgagtcaactaatagaccaactaattattagctattagtcgttagcttctttaatctaagctaaaaccaactaatagcttatttgttgaattacaattagctcaacggaattctctgtttttctaaaaaaaaactgcccctctcttacagcaaattgtccgctgcccgtcgtccagatacaatgaacgtacctagtaggaactcttttacacgctcggtcgctcgccgcggatcggagtccccggaacacgacaccactgtggaacacgacaaagtctgctcagaggcggccacaccctggcgtgcaccgagccggagcccggataagcacggtaaggagagtacggcgggacgtggcgacccgtgtgtctgctgccacgcagccttcctccacgtagccgcgcggccgcgccacgtaccagggcccggcgctggtataaatgcgcgccacctccgctttagttctgcatacagccaacccaaggatgtccaacctgctcacggttcaccagaaccttccggctcttccagtggacgcgacgtccgatgaagtcaggaagaacctcatggacatgttccgcgacaggcaagcgttcagcgagcacacctggaagatgctgctctccgtctgccgctcctgggctgcatggtgcaagctgaacaacaggaagtggttccccgctgagcccgaggacgtgagggattaccttctgtacctgcaagcgcgaggtttgtttctgcttctacctttgatatatatataataattatcattaattagtagtaatataatatttcaaatatttttttcaaaataaaagaatgtagtatatagcaattgcttttctgtagtttataagtgtgtatattttaatttataacttttctaatatatgaccaaaacatggtgatgcctaggtctggcagtgaagaccatccagcaacaccttggacaactgaacatgcttcacaggcgctccggcctcccgcgccccagcgactcgaacgccgtgagcctcgtcatgcgccgcatcaggaaggaaaacgtcgatgccggcgaaagggcaaagcaggccctcgcgttcgagaggaccgatttcgaccaggtccgcagcctgatggagaacagcgacaggtgccaggacattaggaacctggcgttcctcggaattgcatacaacacgctcctcaggatcgcggaaattgcccgcattcgcgtgaaggacattagccgcaccgacggcggcaggatgcttatccacattggcaggaccaagacgctcgtttccaccgcaggcgtcgaaaaggccctcagcctcggagtgaccaagctcgtcgaacgctggatctccgtgtccggcgtcgcggacgacccaaacaactacctcttctgccgcgtccgcaagaacggggtggctgcccctagcgccaccagccaactcagcacgagggccttggaaggtattttcgaggccacccaccgcctgatctacggcgcgaaggatgacagcggtcaacgctacctcgcatggtccgggcactccgcccgcgttggagctgctagggacatggcccgcgccggtgtttccatccccgaaatcatgcaggcgggtggatggacgaacgtgaacattgtcatgaactacattcgcaaccttgacagcgagacgggcgcaatggttcgcctcctggaagatggtgactgagctagacccagctttcttgtacaaagtggccgttaacggatccagacttgtccatcttctggattggccaacttaattaatgtatgaaataaaaggatgcacacatagtgacatgctaatcactataatgtgggcatcaaagttgtgtgttatgtgtaattactagttatctgaataaaagagaaagagatcatccatatttcttatcctaaatgaatgtcacgtgtctttataattctttgatgaaccagatgcatttcattaaccaaatccatatacatataaatattaatcatatataattaatatcaattgggttagcaaaacaaatctagtctaggtgtgttttgcgaattgcggcaagctgttaccgaattcctgcccttaaggccaattgttcaagattcattcaacaattgaaacatctcccatgattaaatcagtataaggttgctatggtcttgcttgacaaagtttttttttgagggaatttcaactaaatttttgagtgaaactatcaaatactgattttaaaaaatttttataaaaggaagcgcagagataaaaggccatctatgctacaaaagtacccaaaaatgtaatcctaaagtatgaattgcattttttttttgtttggacgaaaggaaaggagtattaccacaagaatgatatcatcttcatatttagatcttttttgggtaaagcttgagattctctaaatatagagaaatcagaagaaaaaaaaaccgtgttttggtggttttgatttctagcctccacaataactttgacggcgtcgacaagtctaacggacaccaagcagcgaaccaccagcgccgagccaagcgaagcagacggccgagacgttgacaccttcggcgcggcatctctcgagagttccgctccggcgctccacctccaccgctggcggtttcttattccgttccgttccgcctcctgctctgctcctctccacaccacacggcacgaaaccgttacggcaccggcagcacccagcacgggagaggggattcctttcccaccgttccttccctttccgccccgccgctataaatagccagccccatccccagcttttttccccaatctcatctcctctctcctgttgttcggagcacacgcacaatccgatcgatccccaaatccccttcgtctctcctcgcgagcctcgtggatcccagcttcaaggtacggcgatcgatcatcccccctccttctctctaccttcttttctctagactacatcggatggcgatccatggttagggcctgctagtttcccttcctgttttgtcgatggctgcgaggcacaatagatctgatggcgttatgacggctaacttgtcatgttgttgcgatttatagtccctttaggagatcagtttaatttctcggatggttcgagatcggtggtccatggttagtaccctaagatccgcgctgttagggttcgtagatggaggcgacctgttctgattgttaacttgtcagtacctgggaaatcctgggatggttctagctcgtccgcagatgagatcgatttcatgatcctctgtatcttgtttcgttgcctaggttccgtctaatctatccgtggtatgatgtagatgttttgatcgtgctaactacgtcttgtaaagttaattgtcaggtcataatttttagcatgcctttttttttgtttggttttgtctaattgggctgtcgttctagatcagagtagaagactgttccaaactacctgctggatttattgaacttggatctgtatgtgtgtcacatatcttcataaattcatgattaagatggattgaaatatcttttatctttttggtatggatagttctatatgttggtgtggctttgttagatgtatacatgcttagatacatgaagcaacgtgctgctactgtttagtaattgctgttcatttgtctaataaacagataaggatatgtatttatgttgctgttggttttgctggtactttgttggatacaaatgcttcaatacagaaaacagcatgctgctacgatttaccatttatctaatcttatcatatgtctaatctaataaacaaacatgcttttaaattatcttcatatgcttggatgatggcatacacagcggctatgtgtggttttttaaatacccagcatcatgggcatgcatgacactgctttaatatgctttttatttgcttgagactgtttcttttgtttatactgaccctttagttcggtgactcttctgcaggtcgactttaacttagcctaggatccatggcccagtccaagcacggcctgaccaaggagatgaccatgaagtaccgcatggagggctgcgtggacggccacaagttcgtgatcaccggcgagggcatcggctaccccttcaagggcaagcaggccatcaacctgtgcgtggtggagggcggccccttgcccttcgccgaggacatcttgtccgccgccttcatgtacggcaaccgcgtgttcaccgagtacccccaggacatcgtcgactacttcaagaactcctgccccgccggctacacctgggaccgctccttcctgttcgaggacggcgccgtgtgcatctgcaacgccgacatcaccgtgagcgtggaggagaactgcatgtaccacgagtccaagttctacggcgtgaacttccccgccgacggccccgtgatgaagaagatgaccgacaactgggagccctcctgcgagaagatcatccccgtgcccaagcagggcatcttgaagggcgacgtgagcatgtacctgctgctgaaggacggtggccgcttgcgctgccagttcgacaccgtgtacaaggccaagtccgtgccccgcaagatgcccgactggcacttcatccagcacaagctgacccgcgaggaccgcagcgacgccaagaaccagaagtggcacctgaccgagcacgccatcgcctccggctccgccttgccctccggactcagatctcgatagggtaccaatggccagttaacagatccagctgctgctgttctagggttcacaagtctgcctatttgtcttccccaatggagctatggttgtctggtctggtccttggtcgtgtcccgtttcattgtgtactatttacctgtaatgtgtatccttaagtctggtttgatggtgtctgaaacgttttgctgtggtagagcagcatggaagaactataatgaataagtgatccctaatcattgtgtccaaattttgcttctgctatacccttttgtgctgtttcttatgttttgcttaaaaatttgatctgacaaacaaatttgtctaaattatgctcttgttctgactgtgtactgtacacatttgtattgctaccggtttggcacatagttttctctttgattgcagatcaaacccttctgattgcagattgcttggctatggctgatgtgctcactgttcttctttagcttgtatattgctgatggtggcttggctacggctgaaaaagttgctgctgcgccgacttggcaactgttgctccagtaatgctttgtcctctcttcctagccgccgacttggcacttggcagctgttgctcctgtaatgcgttgttatctcttatctcttgagatgtactatgattttgaggctgtttgacttgtgccagattgccagtgctgatgctatattatctcaggtttttatgctagtatatgttttactgtgtgctgcctgtgtcgagttacgtaatctattgaaccgctatgcgtgttgatgccctgttgttgcttgccagattgatgcccctgttgcttgcagcttgcaagctgtagtgaaatcctaaaattcgaaaccaaatctattctgaacttttgaagatctgtgatgtccggaagaaaagattcaaacagataaacgggactctccagaatctataaaataaatgatcgacaaacgctttgctttggtaggcttcctagttagttagcggaccgaagcttcggtccgggcctagaaggccagcttcggccgccccatttcaaatatttttttcaaaataaaagaatgtagtatatagcaattgcttttctgtagtttataacttcgtatagcatacattatacgaagttatacttttctaatatatgaccaaaatttgttgatgtgcaggtcttcgcctaccccggcggcgcgtccatggagatccaccaggcactcacccgctcccccgtcatcgccaaccacctcttccgccacgagcaaggggaggcctttgccgcctccggctacgcgcgctcctcgggccgcgtcggcgtctgcatcgccacctccggccccggcgccaccaacctagtctccgcgctcgccgacgcgctgctcgattccgtccccatggtcgccatcacgggacaggtggcgcgacgcatgattggcaccgacgccttccaggagacgcccatcgtcgaggtcacccgctccatcaccaagcacaactacctggtcctcgacgtcgacgacatcccccgcgtcgtgcaggaggctttcttcctcgcctcctctggtcgaccagggccggtgcttgtcgacatccccaaggacatccagcagcagatggcggtgcctgtctgggacaagcccatgagtctgcctgggtacattgcgcgccttcccaagccccctgcgactgagttgcttgagcaggtgctgcgtcttgttggtgaatcgcggcgccctgttctttatgtgggcggtggctgcgcagcatctggtgaggagttgcgacgctttgtggagctgactggaatcccggtcacaactactcttatgggcctcggcaacttccccagcgacgacccactgtctctgcgcatgctaggtatgcatgggacggtgtatgcaaattatgcagtggataaggccgatctgttgcttgcacttggtgtgcggtttgatgatcgcgtgacagggaagattgaggcttttgcaagcagggctaagattgtgcacgttgatattgatccggctgagattggcaagaacaagcagccacatgtgtccatctgtgcagatgttaagcttgctttgcagggcatgaatgctcttcttgaaggaagcacatcaaagaagagctttgactttggctcatggaacgatgagttggatcagcagaagagggaattcccccttgggtataaaacatctaatgaggagatccagccacaatatgctattcaggttcttgatgagctgacgaaaggcgaggccatcatcggcacaggtgttgggcagcaccagatgtgggcggcacagtactacacttacaagcggccaaggcagtggttgtcttcagctggtcttggggctatgggatttggtttgccggctgctgctggtgcttctgtggcaaacccaggtgtcactgttgttgacatcgatggagatggtagctttctcatgaacgttcaggagctagctatgatccgaattgagaacctcccagtgaaggtctttgtgctaaacaaccagcacctggggatggtggtgcagttggaggacaggttctataaggccaacagagcgcacacatacttgggaaacccagagaatgaaagtgagatatatccagatttcgtgacgatcgccaaagggttcaacattccagcggtccgtgtgacaaagaagaacgaagtccgcgcagcgataaagaagatgctcgagactccagggccgtacctcttggatataatcgtcccacaccaggagcatgtgttgcctatgatccctagtggtggggctttcaaggatatgatcctggatggtgatggcaggactgtgtactgatgactagctagtcagttaacagatctgccagatcctcggtgtacaaataacccgtcttatcctatgagacgggccggcgtcagtgtgttctggaggaatttttatgtcagagcctttttctttgtgtgcttgatgtagatgccaagggaagcttattggctgttgaagcttgatgcaaaataaattatggaactctgttttttgtttatctaataataactagcaaatatgcttccattgcattgaaactaacagccttttgtgtttccaagttttattttgtgacaatgtcatctatttcaattagttgtggaatcggaaacttgcaggactaacttggaaactccaatccctcagcatcctggactttttcctggtgtaatccatgtagatattattttaatcatcattttagttctggaggtttttccatctccggttttgctcccctttcttcaaaaaaaaaaaaaaaatgccgtaggcgccgcaacgcccacctgttgttcaaactcatgggcacgagtggctcgaagattttatacaacaattgctgtagtttcaccgttgctggtgaagaagcatttttttaaaaaaatatagtggtattcattttaattagtttagttgtgcagcgagcaaaatttggacatgctctgctcggaatctgatcgacctagacacagattagcagcagtagctttgtcatctgttccaagagttgcgatctgatagaagaaaaaaaaaccttcccttcaatgtaaaaccgaaactaacaagaaagaagcacagtgccgtttaggcaagtatggagtacgtattaagcatgtagaaggccatgcatgaaccactaacaagaaagaagcgcagtgccattcaggcaagcataagcatgtagattggcatgcatgaacaactaacagtagatcgtctctggtctgattagaagttttttgggaagccaagaaatcatgtacaactggttccatctcaaattccgtggcaaaaagaggcctaagcaacataaagctttccactggttgccatatatgatttgggcatttcactttgatcttaatgggccttgtaaagcccaagactcatgattatctttagttgatgctcttaattaggtgtgggcaaataattcaaactgtatgtacccgaccaaaaccaaagcaaaaataatcgaaccaaaccgaaaatttaaaaataaccgaatgaaaactaaatcctataactgaaagaactgaaaccgaatcaaaatatttaatgtaaccaaaaatatccgaaatataattatattgtcaaaaatattaataatttctagattaaataattaaaaatacttaaaaatttatataaaatagtaaaaatactcgaaaataaccacaaatattcaaaaacaaccgaaatatcccaaaatattcaaagcaaaataaccgaatggataccaaattttaaaaccgaaaaaactggaacaaaaccaaaatcgaaccaaaatttcaaaaatcgaataaatactaaactttagaacaaaaaaaaacgataaccgaatgtatacgaaccaaagccgaattagataaccgaacgtccaggactactcttaatctttccgccacttatgatttgggctattactttgtttataatgagccttttcaagctcaagttcatgattgtccgtgagatgagaaactgacttgttggattcgaaaccctagctagtattggttaatacttaatacataaatgacctgcattgacatcatcatccaagaaaataaaaattgtatgcttgagatatttagttttcctagctaggttttctttattttagtaccgaatctttaggtgtgccacgttaatttagacccattttttcatacttaccaactgagtctagtttaatcatgactataatcgtataaaatgattcagtcgacgtcattgcgaacgtatataaaatcatccaaattgacgtcattccaaagaggtaagcatgcttatctaagagtccgagcatactaaacaagacgacattttatttgcactccaaatcaaattttgtattgcctaaagaaaaacaatcaaactcaagtttcttaaaattaatttcattcaaactaatcactttcaatatctcacatattattcatgccatttctatttgtctaaacatgatttaaaaaaaaaagtaaaatacaaagattactatgcaaaaactctataaaaaaaaattcaaatttcttatttatttgtgacatcaaattttcaaaataatttttttaattatcggttgatccggtcagtcgataaaaacataaactttcagcgaccgttaaaactttcctactaccgatttagagaaaatcttagcttgaaacgtaattgtaacctgccttcatgcaagtcgcaagatatgtcatcctaagttgtatatgttttctcaaaagatgtatttacttgagaaaatacgtttcaacgttgatggacaaccaattaagaatcaagcacctttcgtaatcaatttaggcttatcgtctaaggtatactgatttacgacagttgactagacttataaggaacaaaataatagaatagtttctaaacacttcacctaatcatagagactaagatggtaattcgtaaacgacaaagcctagtgacactgtccattgtaaaattccacatcatattagtattaaacatatacatgtagtttcctgaacacatgtagtatcaaacacacttcgtggcttcttcctcgaaacctgcggccgctcattaattaagtcatctagttgaaggatcgctatcaactttgtatagaaaagttgggccgaattcgagctcggtacggccagaatggcccggaccgaagctttgagccaatgggcacagggtcagtgggggtcgcggggccgatgcggagctgacagaagcagggcgagcggttgccgagccgacgagcacatcgacaaagcgggaacggcgggtgtcgatggcgcgggccttgacggagatgcagccaccctttcctcgttcacctcggacaccactgttgacggcgccgcatcgctggcctgcttccagcggccgagatctgaaggaggctgtagagggagaagaaggaaaggggaggggctgacgggtgggatccacattgctttccacacgggcatgctacatagataaaagtgacaaatagttaaaaaattatctctctccagtagcaaattattaagcgtgaatctaaaatggacatttgtataactgtttaccaacatgtacggtttgcgagttgggacgcaatgtggccagaataccagaccaaataagtgaggagctgtttggtttacatggacttatttcaagtccctgtctcatcggatgtttggacactaatttagagtattaaacatacattaattacaaaacccatttcataagtttggattaattcgcgagacgaatcttttgagtctaattacgccatgattttgacaatgtgatgctacagtaaacttttgataattatggattaactaggcttaaaaaaatcgtctcgcggattagctctcatttataaaattagttttttattagtctatatttaatactctaaattagcgtccaaacatccgatgtgacatgggctaaaaagttttagccccatctaaacaccccctgaatcgtttgattctagggttgtgtttagttccttataaagttagaagtttgggttaaaattggtacgatgtgactgaaaagttatgtatatgatagattgatgtgatggaaaaagttagaagtttggatccagcctaggtagccgtcggtcgtccatccggagtggtgggcgtcaggctagcttcggccagcggagggcattttggccgccgccgacgcttcggccggcgtatcaacggcctcgcggtaaaagaggtggcccaattcaatttcgtcttctcaactttactgaacaactcctctccacccgtcccaactactcttcctttgtttctaacaacaattttcaaagaagaaatcaattgagaaataactagaatttcgtattcttcgtatgtttttgttcaagagttgggattgatcgagttgagttaaaatgaatgtttggtctaaagacatgtgaaataagatgatttttaactctttaattttctctcttgttcacgtttgagccatcccttaaaagtagaaccatcgtatccctcatgccaaacgaatatactagcagtatgggtctaacccatctcactttcttcctaaaccaaacatatatatatatgattagttacgtcattttaaatataagacgtaaccttttttttatgttttataatacgaggcgtgcatatttttaatcttattgaatatatgtattatatttattagagtgatctaagcgtggaggtaataataattttttttttgtctttgcattaggtagactgatagtctgcttatattttgtgatgaaggcagtataattcattggcttaattagattaaagcaagaattgacactatccatttttggaattaaattagcaagatacttatttaacatactccaaaatatgcacaacttcaaatttattaattatgaagttttaaaatattataatctggaaaactaaagcgtaggctcgaagtttagtacaactatgtatatactaattttggattcaaactttatttttttttctatcaaaagattaagactccacaccaaatacaacaaactttataattaaaataatttaaataactcatgaaatacaataactgcaaatggagtacaaatttgtatttattattaatttgagaaaacaactaaacttaagatttgatgaatttattactaatttgagaaaacaactaaaattaagatttgatgaatacattttttactcgttaatcataaatttcagaactgttatattataggaaactacgtactctcttggtcctaacaaatattattgttaaactcggtttttgacttggtcctaacaaatattattgttaaactcggtttttgacttctagtttattttttaattttgcgtctatgtattcttataatctaaatataatgtaaactatttaagctgaaattaagaaaatacagctacgaagctccccaaacatgctccgatgcccgtagtttgcgttggccggtgaagcaattaaggtggagtttggatacagggactttaactttagtctctgtatttggatattaatttaaagtattaaatatagactacttacaaaactaattacataaataaaagctaatttgcgagtcaaattttttaagcctatttaatatacaattagagaatatttaatgtagcattatatagactaatcatggattaattaggctcaataaatttgtctcgcgaattagtttaagattatagatgagttttattaatagtctacgtttaatatttataattagtatcaaaacatccgatatgatagttacttaaaaagttttaaaaaggtataaacaccttgcatggcatgcacttcaacctaaaatcgatgtcaattttacttttaaaaaaacttgtactaaaatcaaagcagcgcggcgtgtcgcaggggcatcagtaataatcaccatcccgctcgtgcgcgcgcgttcataccgcatgcatttgcatgcacacacacgcgtagcactagtactctctctctctctctgtgttgataaccccaatacaaatgcagggcttctctctctacctctgctatttgctgagactagaaaggaagagtctatctagggcttgctgcccataaagacgacaagaaccacctctctctctctctctcactgtccacatctctccaacaagagaaatactttacacacttgcagcaactcttccccagtctaggcgcgccatttaaatatggcgcccagcagctacgaggtggcggcttccatcctcctctgcgccgaggacagcagcagcatcctggacctcgaagcggaggccgaggaggaagcgctactggcgcggagcggggagcccggcggcggcgcggagttccccgtgccgtccgaggaatgcgtcgccggtttcctggagtctgaggcagcgcacatgccgcgggaggactacgccgagaggctgcgcagcggggggatggatctccgcgtccggacggacgccatcgactggatttggaaggttcacacgtgctacggtttcggccctctcactgcctgcttggccgtcaactacctggaccgcttcctctcgctctaccagcttccggaaggcaaggcttggatgacacagctgctgtccgtggcgtgcttgtccctggccgccaagatggaggagacctacgtcccttcgtccctggacctgcaggccggggacgcgcggtacgtgttcgaggcgaagacgatccagaggatggagctcctggtcctcagcacgctcaagtggaggatgcaagcggtcacccccttgtcgtacgtcgactacttcctccaccggctccgaggcggcgccgcgccgagcagacgcgccgtcctccgatccgcggagctcatcctgtgcatcgccagagggacgcactgcttggatttcaggccctcggagatcgccttggccgtcgccgccaccgtggccggcgaagagcgcgccgtggacatcgacagggccttcacccaccgtgtacataaggagagggtgtcgcgatgcctcgaagcgatccagcaggccaccgccaccatggccctgccgcagccgctgaaaagtgaaggcccgagcagcagcggccgcagggcctcgtcttcctcggccaccgtgccgcggagccccaccggggtgctggacgctggctgcctgagctacaggagagccgccgccgccgccgcctcgcacgcgagctccagctggcgcgacgaggacgacgacgactgccccccggctgtctgcagcaagaggaggaagattagcagatgaatttaaatgcccgggcgatcgctcgaggcgtacctagtggtaccacatggttaacctagacttgtccatcttctggattggccaacttaattaatgtatgaaataaaaggatgcacacatagtgacatgctaatcactataatgtgggcatcaaagttgtgtgttatgtgtaattactagttatctgaataaaagagaaagagatcatccatatttcttatcctaaatgaatgtcacgtgtctttataattctttgatgaaccagatgcatttcattaaccaaatccatatacatataaatattaatcatatataattaatatcaattgggttagcaaaacaaatctagtctaggtgtgttttgcgaatgcggccgccaccgcggtggagctcgaattccggtccgggcctagaaggccagcttcaagtttgtacaaaaaagcaggctccggccagaatggcccggaccgggttaccgaattcgagctcggtaccctgggatccgatatcgatgggccctggccgaagcttggtcacccggtccgggcctagaaggccgatctcccgggcacccagctttcttgtacaaagtggccgttaacggatcggccagaatggcccggaccgaagcttgcatgcctgcagtgcagcgtgacccggtcgtgcccctctctagagataatgagcattgcatgtctaagttataaaaaattaccacatattttttttgtcacacttgtttgaagtgcagtttatctatctttatacatatatttaaactttactctacgaataatataatctatagtactacaataatatcagtgttttagagaatcatataaatgaacagttagacatggtctaaaggacaattgagtattttgacaacaggactctacagttttatctttttagtgtgcatgtgttctcctttttttttgcaaatagcttcacctatataatacttcatccattttattagtacatccatttagggtttagggttaatggtttttatagactaatttttttagtacatctattttattctattttagcctctaaattaagaaaactaaaactctattttagtttttttatttaataatttagatataaaatagaataaaataaagtgactaaaaattaaacaaataccctttaagaaattaaaaaaactaaggaaacatttttcttgtttcgagtagataatgccagcctgttaaacgccgtcgacgagtctaacggacaccaaccagcgaaccagcagcgtcgcgtcgggccaagcgaagcagacggcacggcatctctgtcgctgcctctggacccctctcgagagttccgctccaccgttggacttgctccgctgtcggcatccagaaattgcgtggcggagcggcagacgtgagccggcacggcaggcggcctcctcctcctctcacggcaccggcagctacgggggattcctttcccaccgctccttcgctttcccttcctcgcccgccgtaataaatagacaccccctccacaccctctttccccaacctcgtgttgttcggagcgcacacacacacaaccagatctcccccaaatccacccgtcggcacctccgcttcaaggtacgccgctcgtcctcccccccccccctctctaccttctctagatcggcgttccggtccatgcatggttagggcccggtagttctacttctgttcatgtttgtgttagatccgtgtttgtgttagatccgtgctgctagcgttcgtacacggatgcgacctgtacgtcagacacgttctgattgctaacttgccagtgtttctctttggggaatcctgggatggctctagccgttccgcagacgggatcgatttcatgattttttttgtttcgttgcatagggtttggtttgcccttttcctttatttcaatatatgccgtgcacttgtttgtcgggtcatcttttcatgcttttttttgtcttggttgtgatgatgtggtctggttgggcggtcgttctagatcggagtagaattctgtttcaaactacctggtggatttattaattttggatctgtatgtgtgtgccatacatattcatagttacgaattgaagatgatggatggaaatatcgatctaggataggtatacatgttgatgcgggttttactgatgcatatacagagatgctttttgttcgcttggttgtgatgatgtggtgtggttgggcggtcgttcattcgttctagatcggagtagaatactgtttcaaactacctggtgtatttattaattttggaactgtatgtgtgtgtcatacatcttcatagttacgagtttaagatggatggaaatatcgatctaggataggtatacatgttgatgtgggttttactgatgcatatacatgatggcatatgcagcatctattcatatgctctaaccttgagtacctatctattataataaacaagtatgttttataattattttgatcttgatatacttggatgatggcatatgcagcagctatatgtggatttttttagccctgccttcatacgctatttatttgcttggtactgtttcttttgtcgatgctcaccctgttgtttggtgttacttctgcaggtcgactttaacttagcctaggatccatggcctcctccgagaacgtcatcaccgagttcatgcgcttcaaggtgcgcatggagggcaccgtgaacggccacgagttcgagatcgagggcgagggcgagggccgcccctacgagggccacaacaccgtgaagctgaaggtgaccaagggcggccccctgcccttcgcctgggacatcctgtccccccagttccagtacggctccaaggtgtacgtgaagcaccccgccgacatccccgactacaagaagctgtccttccccgagggcttcaagtgggagcgcgtgatgaacttcgaggacggcggcgtggcgaccgtgacccaggactcctccctgcaggacggctgcttcatctacaaggtgaagttcatcggcgtgaacttcccctccgacggccccgtgatgcagaagaagaccatgggctgggaggcctccaccgagcgcctgtacccccgcgacggcgtgctgaagggcgagacccacaaggccctgaagctgaaggacggcggccactacctggtggagttcaagtccatctacatggccaagaagcccgtgcagctgcccggctactactacgtggacgccaagctggacatcacctcccacaacgaggactacaccatcgtggagcagtacgagcgcaccgagggccgccaccacctgttcctgtagggtaccacatggttaacctagacttgtccatcttctggattggccaacttaattaatgtatgaaataaaaggatgcacacatagtgacatgctaatcactataatgtgggcatcaaagttgtgtgttatgtgtaattactagttatctgaataaaagagaaagagatcatccatatttcttatcctaaatgaatgtcacgtgtctttataattctttgatgaaccagatgcatttcattaaccaaatccatatacatataaatattaatcatatataattaatatcaattgggttagcaaaacaaatctagtctaggtgtgttttgcgaatgcggccgccaccgcggtggagctcgaattccggtccgggcctagaaggccagcttcggccgccccgggcaactttattatacaaagttgatagatcctcatgtcttcatcgtaagcttaaacaggccagaatggcctctggattcagcggcctagaaggccgaagtacttggtcttcctagtcgagtagatcacattcaagcttggtcacccggtccgtcaatattctgattccgatgacttcgtaggttcctagctcaagccgctcgtgtccaagcgtcacttacgattagctaatgattacggcatctaggaccgactagtggcgcgccgactagctagctaaggtaccgagctcgaattcattccgattaatcgtggcctcttgctcttcaggatgaagagctatgtttaaacgtgcaagcgctactagacaattcagtacattaaaaacgtccgcaatgtgttattaagttgtctaagcgtcaatttgtttacaccacaatatatcctgcca

SEQ ID NO: 68 - DNA, 1086 bp, Arabidopsis thaliana
atggctgagaatcttgcttgtggtgaaaccagcgagtcatggatcattgacaacgacgatgatgatatcaactatggcggcggatttacgaacgagattgattacaatcaccaactttttgctaaagacgacaactttggcggcaacggatcaattccgatgatgggttcttcttcatcgtccttgagtgaagacagaatcaaagagatgttggtgagagagattgagttttgccctggaactgattatgttaagagattgctttctggtgatttggatttgtctgttcgaaaccaagctcttgattggattctaaaggtttgtgctcattaccattttggacatctgtgcatatgcctatccatgaactacttggatcggttcttaacatcctatgaattgccgaaagacaaggattgggctgctcagttactagctgtgtcttgcttatcattagcatccaaaatggaagaaactgatgtgcctcacattgttgatttacaggtggaagatcccaagtttgtttttgaggccaaaacaataaaaaggatggagcttttggttgtcaccactttgaattggagattgcaagctctaactccattctccttcattgattatttcgttgacaagatcagtggtcacgtgtcggagaatttgatctatagatcgtcaagattcatcttaaacaccaccaaagcaattgaattcttagacttcaggccttctgagatagctgcagctgctgcagtgtctgtttccatttcaggagaaacagaatgcattgatgaggaaaaggcactgtctagtctcatatatgtaaaacaggagagggtgaagagatgtttgaatctgatgagaagtctcactggggaggagaatgtgcggggaactagtttatcgcaggagcaggcgcgagttgcggtaagagctgtacctgcaagtccagttggagtgttggaagcaacatgtttgagctataggagtgaagagagaacagttgagtcatgtacaaattcctcacagagtagtccagacaacaacaacaacaacaacaacagcaacaagaggaggagaaaacaatga

SEQ ID NO: 69 - DNA, 927 bp, Arabidopsis thaliana
atggcagaggagaatctagaactgagtcttttatgtacagagagcaacgttgatgatgagggcatgattgttgacgaaactccgattgaaatttcgattcctcagatgggtttttctcaatcggagagtgaggagattatcatggagatggtggagaaggagaagcagcatttgccaagtgatgattacatcaagagacttagaagtggagatttggatttgaatgttggaagaagagatgccctcaattggatttggaaggcttgtgaagtacaccagtttggaccattgtgtttttgcttagcaatgaactacttggatcgattcttatcggttcatgatttgcctagtggcaaaggttggatattgcagttgttggctgtggcttgtttatcattggcagccaaaattgaagaaactgaagttccaatgttgatagatcttcaggttggagatcctcagtttgtgtttgaggctaaatcagtccaaagaatggagcttttggtgttgaacaaattgaaatggagattgagagcaataactccatgctcatacataagatatttcctgagaaagatgagtaaatgtgatcaagaaccatccaacacattgatatctagatcattacaagtgatagccagcacaaccaaaggtattgactttttggagtttagaccttctgaagttgctgctgctgtggcactttctgtttctggagaattgcagagagtacactttgacaactcttccttctctcctcttttctcactacttcaaaaggagagagtgaagaagataggggaaatgatagagagtgatggctcagacttatgttcacaaacacccaatggggttttagaagtatcggcttgttgtttcagctttaagacccatgattcttcttcttcttatacacatctttcttaa

SEQ ID NO: 70 - DNA, 897 bp, Arabidopsis thaliana
atggctgaatttatggaaccaaatcttgtatccaattttgatgatgagaagagcaattctgtcgacacaagatcgatttttcagatgggttttcctctggagagcgaagagatcgttagagagatgattgagaaagagagacaacactcaccgagagatgattacctcaagagactgagaaacggagatttggatttcaatgtcagaatccaagcccttggttggatttggaaggcctgtgaggaacttcaatttggaccattgtgtatatgtctagcaatgaactacttggatcgtttcttatctgttcatgacttacctagtggaaaagcttggactgtacaattgttggctgttgcttgtttatcattggcagctaaaatagaggaaactaatgttccagagttaatgcagctgcaggttggagctcccatgttcgtgtttgaggctaaatcagttcaaaggatggaacttttggtgttgaacgtattgagatggaggttacgggcagtgacaccgtgctcttacgttagatacttcctgagtaagatcaatggctatgatcaagaaccacatagcagattggtaactagatcactacaagtgatagccagcacaaccaaaggtattgacttcttggagtttagagcttcagagattgctgctgcagttgctctttctgtttctggagaacactttgacaaattctccttctcttcttccttctcaagccttgaaaaggagagagtgaagaagattggtgaaatgatagagagagacggatcaagttcaagttcacaaacaccaaataatacagtcttacaatttaagagtcgtcgttattctcattctctttctactgcttctgtttcctcctccctcacttctctttcttaa

SEQ ID NO: 71 - DNA, 987 bp, Glycine max
atggcacccagttttgattgcgtttcgagccttctctgtgccgaagacaacagtatttttgacgaaaacgattatggggatatcgtcgaaaccttagtcaaaagtgatgagtgcttgagactgatggtggagaaggaatgggatcacttgcctaatggtgattatgtgaataggctgaggagtggggatttggattttggggccagaaaagaggccattgattggattgaaaaggttcaacagcactttggttttggacccctctgtgcatatctatccataaactacttggaccgtttcctttctgcatatgaattaccaaagcacagagcttggacaatgcaattgttggctgtggggtgcttatctctggcagccaaaatggaagagactgatgtccctttctctcttgatttgcaggtgggtgaatctaagtatatatttgaggctaaaacaatacagagaatggagcttctggtgctgagcacattgagatggagaatgcaggcaattaccccattttccttcattgaccatttcctttacaagatcaatgatgatcaaagtccaattggagcttcaattttgcaatccatccagcttatactgagcactgtaagaggaattgacttcttagaattcagaccctcagagattgcagcagcagtggcaatatctgtggtgggggagggccaaacagtgcacactgagaaagcaatttctgttctgattcagcttgtggaaaaggagagggtcttgaagtgtgttaaaatgatccaagagctggcatcaaatagtggtggttctgccaagggtgctagtgcttctgtttctgtccctagcgtgcccgaaagcccactaggggtgttggtcactgcatgcttcagctacaaaagtgatgacacaaatgctgcttcatatgcaaattcttcacataacattagtccagatgctaaaaggaggaagctaaacaaaacctttggataa

SEQ ID NO: 72 - DNA, 1074 bp, Glycine max
atggcacccagttttgattgtgtttcgagccttctctgtgtggaagacaacagtatttttgacgaaaacgattatggtggttcggtggaggtgttggaggacgcgtggcaggatcctagatatcgtcgaaaccttagtcaaagtgagaacttggatgtcccaaatgggtggtttcagttgcagagtgatgagtgtttgagactgatggttgaaaaggaatgggatcacttgcctaatggtgattataggaataagctgaggagtggggatttggactttgaggccagaaaagaggccattgattggattcaaaaggttcaagagcactttggttttggacctgtctgtgcatatctatccataaactacttggaccgcttcctttctgcatatgaattaccaaagcatagaacttggacaatgcaattgttggctgttggatgcttatctctggcagccaaaatggaagagactgatgctcctatgtctcttgatttgcaggtgggtgaatctaagtatatatttgaagccaaaacaatacagagaatggagcttctggtgctgagcacattgaggtggagaatgcaggcaattaccccattttccttcattgaccatttcctttacaagatcaatgatgatcaaagtccaattggagcttcaattttgcaatccatccagcttatactgagtactgtaagaggaattgacttcttagagttcagaccctcagagattgcagcagctgtggcaatatctgtggtgggggagggccaaacagtgcaaactgagaaagcaatttctgttctgattcagcttgtggaaaaggagagggtattgaagtgtgttaaattgatccaagagctggcatcaaatagtggtggtggttctgccaagggtgatagtgcttctgtttctgtccctagcgtgccccagagcccaataggggtgttgaacactgaatgcttcagctacaaaagtgatgacacaaatgctgcttcatgtgcaaatacttcacataacaatagtccagatgctaaaaggaggaagctaaacaaaacctttggagaatag

SEQ ID NO: 73 - DNA, 1086 bp, Glycine max
atggctcacaactcagacagtgccacctccaaccttcttctctgttcggagaacagcagcacctgcttcgatgatgatttggaatgttgtgatgccgcagatgggtccaactccagaatctcgcatcagttctgggaccaccatgagggtggtggtggtggtggatcggagttgttggcgtgttttgtggcgcagagtgaggaaactgtgagggctatggtggagagagagagggagcatttgccgagggatgattacttgatgaggctgaggagtggggagttggacttgggtgttaggagggaggctattgattggatttgtaaggctcattcttattttggctttggacccttgagtttttgtttagctgtgaactacttggaccgcttcctatcggtttttgatttaccgagaggtgtgacttggactgtgcaattgttagctgtagcttgcttgtcgattgcggctaaaatggaggagatcaaagtgcctcaatccgtagatttacaggttggggaaccaaagtttgtgtttgaagctagaaccattcaaaaaatggaactacttgtattaagcacattgggatggaaaatgtgcgctataactccttgttccttcatagactacttccttggcaagatcacttgcgagcagcatccagcaaaatcatccgtttcaatatcagtgcagctcatccttggcataatcatgggtattgactacttggaattccggccttctgaaattgctgccgcggtggctgtttctgttttaaaggaattgcaagcgatagaaattgataaggccataattgatctcttagtagtagagaaggtgagagttctgaagtgtgttgaattgataagagatttgtccttgatcaatgttgctgctagtttaggcagcaaggtaccatatgtgccccaaagtccaattggggtgctggatgctgggtgcttaagttataagagtgatgaattaactgttggatcatgtccaaattcttcacataatatttcaaatccaaaccctactaagaggagcaaaccagatggaccttctaatggaacctccaattcatga

SEQ ID NO: 74 - DNA, 933 bp, Glycine max
tgtctgattaaggacaatcatggatcggaacatttttgggatttttctgtactgagcgatgaaactgttatggatttggttgggagggagagcgagcatttgccccacgttggttacctcaagaggctgcttagtggggacttggacttgagtgttaggaatgaggctcttgattggatttggaaggctcatgcttactatggttttggaccctgtagtttatgtctatctgtgaactacttggatcggttcctatcagtatatgaattaccaagaggcaaaagttggagtatacaactgttagcagtagcatgtttgtcaattgctgccaaaatggaggagattaaagtgcctccttttgtagatttacaggttggagaacctaagtttgtatttgaagctaaaaccattcaaagaatggaactactggtgttaagcacattgagatggcaaatgcaggcttcaactccattttccttcctagattacttcctcaggaagatcaactgtgaccaagttatagtaaagtcatccattatgagatcagtaggacccatccttaacataattaaatgtatcaatttcttggaattcaggccctctgaaattgctgcagcagtggcaatttctgtatcaagggaaatacaagcagaagagattgacaaagccttacaaatgcaagcagaagaaactgctgcagcatttactgcattttgttttctaagttatgagggtcttgaattgatcaaagatttgtcattgatgcaagattctgcaaacttgggcaataacttagcatcatttgtaccccaaagccctattggggtgcttgatgctgcatgcttgagctctataagtgatgaattaacagttggatcatatagagattcttcccttgatactccaaattctaagaggaggaaatctgactaa

SEQ ID NO: 75 - DNA, 1870 bp, Oryza sativa
cccgcttcagttggcagctgccctgtttctgcttcatgtcctgcccaaaatgccctcctcctaccctccacgcggctgtgtatacaaagagaacgcatccccccattgctcacttgccccctcctcctctttcacacctcacctcccaccaagataaagagcaagaacagcaagagcaagaagaggaggagggagaccacacaatctatcacaagcttagcaagatttatcagcaaggaaatggcagctctgacgagctacgagatggcggcctccatcttgctctgcgccgaggacagcagcagcgtcctcggcttcggcggcgaggaagaggaagaggaggaggacgtcgtggctgggaagagggccaggtgcgctggtccgccgccgccgccgtgcgtggacgtcgctggcgtggatttcgccgtgccgtcggaggaatgcgtcgcccgcctggtggagacggaggcggaccacatgccgagggaggactacgccgagaggctgcgcgccggcggcggcgacggcgacctggatcttcgcgtcaggatggatgccatcgattggatttggaaggttcactcctactacagcttcgctcctcttactgcctgcttggccgtcaactacttggaccgcttcctctcactctaccagcttccggatggcaaggattggatgacgcagctgctagcagtagcgtgcttgtcgcttgctgccaagatggaggaaaccgatgtgcctcaatcgctggacctgcaggtcggggaagaacggtacgtgttcgaggcgaagacgatccagaggatggagctgctggtcctgagcaccctcaaatggaggatgcaggccgtcactcccttctcctacgtcgactacttcctccgcgagctcaacggcggcgatccgccgtcgggacgctcggcgctgctgtcttcagagctcatcttgtgcatagctagaggaacagaatgcttgggattcaggccgtcggagatcgccgccgcggtcgccgccgccgtggtcggagaagaacacgccgctttctcccatgtaaataaggagaggatgtcgcattgccaggaagtgattcaggccatggagttgatacatccaaaaccttcaagccccagcagagtcttcgtctcctcctccattccacggagccctactggcgtgttggatgcagcaggctgcctcagctacaggagtgacgattcagctgttgcctcacactacgcagcaagcagctggggatatgaacatgatagctccccggttagcagcaagaggaggaagattagcagatgatgcagccaatgatggatcaattaaaagtctgtttatatgtgttgcgaaactgatcgtgcatctctctttcttgggaaagtcaaatggttttgattgcaaatgactgtggagcctttcgatgccgtatgggagctagagcctgaaaggcgatgaaggaccaaaagcaaggcattttcgacatggcaacagagcaaagatactgatggataaagagagtctgaggtagacatgtgctccaatattttcatgtgctttagcgttagttgctaggaggcaggcagccacaaaagagtagaggatttgtgggaagagagccgggcgagatgaaaatgagatgaccaaaataaaggcagagacgaggtgacagtggcacaaggcaaagcgagctaggcactgacactccagatgtcctgcgtgtgtttcagttttgcgttgttctgtaatttcccctgcttaattcctttgtgaagaaaaatcataaaaaaggagagaaacaaacaattttggtgtcaaactccaataattcagcataactaaactacaagaagaagctgaagca

SEQ ID NO: 76 - DNA, 1959 bp, Oryza sativa
agcgcgcagcgtctctctctctcgctctcgctatctatctctgtccttgtcactgtccgtccttgactcgctagcccaagaagaagaccaaccggagaggggaggggaggggaggcggagagatggctccgagctcgtcgtcctgccacgacgcggccgcgtcgatgctgctctgcgccgaggacaacagcagcatcctgtggctggaggatgaggagggggaggtgggggagaggaggagcggcggttgccggtcgatggtcggggacctcgccgccggcggcggcggcggcagcggcgggggtggagtggaggaggaggaggacatgttcccgcggcagtcggaggagtgcgtggcgagcttggtggagagggagcaggcgcacatgccgagggcggactacggcgagcggctccgcggcggcggcggcgacgtggatctccgcgtccgcagcgaggccatcggctggatttgggaggtttacacttactacaacttcagctctgtcactgcctatctggctgtaaactacctggaccgtttcctgtctcagtacgagctgccggaaggcagggattggatgacacagttgctctcggttgcgtgcttgtctatcgccgccaagatggaggagaccgtcgtcccgcaatgtttggatcttcagattggggaaccacggtttttgttcgaggtggagacgatccatagaatggagcttcttgttctcaccaacctcaattggaggatgcaagccgtgactccattctcctacatcgactacttcctacgaaagctcaacagcggcaatgccgcgccgagaagctggctcctgaggtcgtcggagctcatcttgcgcatagcagcaggaactggattcctagagtttagaccctcggagatcgctgcagcggtggctgccacagtggccggagaagccaccggcgtggtagaagaagacatcgcagaggctttcacccatgtagataaggggagggtgttgcaatgccaggaagcgattcaggatcatcactactccatggccaccattaacactgtgcaacctaaacctgcaagcaccaggagaggctcagcctcagcctcctcctcctctgtgcctgagagccctgttgcggtgctggatgctggctgcctcagctacaaaagtgatgatactgatgcagcaactattgcctcacatggaggaggaagaaggaagagttgctttgatagctccccggtcactagcaagaagaggaggaagcttagcaggtgactgaccagtcaaagtgccaaatgatagatcactctctctgtagtctgtacaccactcatctcgacaaaggcaaagtcaattggtttcgattgcaacgactgttagaaagaaagaacactggaagggggccaaaagggagggaattttgacatgacgagagagagctagctagcaagaagttgctgatgaataaagaggtgaggttgacaacacctaattgctaagcttttgcaagccagcaagccatggtgatgagaggtgcccccaaagaacaaagaaaagctttgtagcaacataaaagcttgatgagtttcaaaaaaaaaagaagaaaaaaaacataaaagctacatgagatgatcaagacaaaggatggtgaggggctttaggcaacaagtccaagaactaggcatgcactgacctggctgtgtagtattcttttgttcactagctctagttgcattagttgcagtattgttttcttttttccatttcatttgtaaggagaaaattagaggcggcagcactcctttttgtgatcagcaatgatgatcatccacatgaataaaataacatggtgtaaccagaaaagaaaattaacaagacccagaaaaagaggaaatgggtttctttcagtatattgctctgcctgcctatctctatattgtttgactgcttgtctgcttta

SEQ ID NO: 77 - DNA, 1859 bp, Oryza sativa
ctcttccccaggagacctctcctctgtctctcccctcctttttccactttccaagacaacgcaccaacaaaagcgtcgcccctcttcctcctcctcctccacctccattgctgcgccctctccctctccctctcgcctccctaggccactcactccccaaaacaccaccaacctcctttcctctctctctcttcttgagttcttgaatcaatgcgttcttgagttcttgaatcaataccagtatcacttgtgctaatagtactagaggaggaggtgttgtttcttgcgatcttgggttgattgatatgggtgttctttgcttcggcgcttccaacatcctcctctgcgcggaggacagcagcagcgtgcttggcctgggcggctttggcggcggcggcggcgaggtggcggcggagctggggtgcggcggcggtggcggctttgatttctttggcttcggtggtggtgctgtgttccccatcgactccgatgagttcgtggcgttgttggtggagaaggagatggatcatcagcctcagcgggggtatctggagaagctggagctcggtggattggagtgttcttggaggaaagatgccattgattggatttgcaaggtccattcctactacaactttggaccactcagcctttacctcgcagtgaactacctggataggttcctctcctcgtttaatctccctcatgacgaatcttggatgcaacagttgctgtcagttagttgtctatctcttgctacgaagatggaggagaccgtggtccctcttcccatggaccttcaggtttttgatgcggaatatgtgtttgaagcaaggcatattaagaggatggagcttattgtgatgaaaaccctgaaatggaggctgcaagctgtgaccccattctctttcatcggctacttcctggacaagttcaatgaagggaagccgccgagctacacgctggcatcatggtgctctgatctcacagtgggcactctgaaagactctaggttcttgtcattcagaccttctgagattgcggccgcagtggtgttagctgtgcttgctgagaatcagtttcttgtcttcaacagtgcccttggagaatctgaaatccctgtaaataaggagatggttatgagatgctatgagctgatggtagagaaggcattggtgaagaagataaggaacagcaatgcaagctcttcagttccacacagcccgatcaccgtgttggacgcggcgtgcttcagttttaggagtgatgacacaacactaggatcatcacagtcaaacagcaacaacaaagattacaacagccaggactctgctcctgcttccaagaggaggagattaaacacaacaccaatctgataactgtacatacataacttggcattgctttgcaattgttcattcagtgagcaactcatcagggtagcaagtagtggtgcatggcgagcatcatcataacaagcaaggatgaaagtgagcagtaataagctagtatcagcttcttgaactctggatgaagagagaaagggtgtgttttgaggagaggaggaagtcttcttcctcttgcagttttgttcccctttcctcctgcttctatttatctttttcttccccttctctgagcagagaaatctttgtggatatgagattggagatgtgaggatgtgagagaaaatcaacaaaaagaatttcgttttgttcctttattctttcaccatataaaaacgattcatggtgtgagaaattctgccattatttttttcatctgaattctggtaaaggtgtgcttctgattcatcaatgagttgactgcttgtctgcgagacctgcatttctctctta

SEQ ID NO: 78 - DNA, 1137 bp, Sorghum bicolor
atggcgccgatgagcagctacgagatggcggcttccatcctgctgtgcgccgaggacagcagcagcatcctggacctcgaagcggaggccgaggaggaggaagtgatgctggcgccacggagcaggaccaggacgcgcggggagcccagcgtggagttccccgtgccctccgaggaatgcgtcgacggtttcgtggaggcggaggcggcgcacatgccgcgggaggactacgccgagaggctgcgcggcggcggaatggatctccgcgtccggatggacgccatcgactggatttggaaggttcacaggtactacggtttcggccctctcactgcctgcttggccgtcaactacctggaccgcttcctctcgctctaccagcttccggaaggcaaggcttggacgacgcagctgctgtccgtggcgtgcttgtccctggctgccaagatggaggagacctacgttcctccgtctctggacctgcaggtcggcgacgcgcggtacgtgttcgaggcgaagacgatccagaggatggagctcctggtgctcagcacgctcaaatggaggatgcaagcggtcactcccttctcctacatcgactacttcctccaccggctcaacggcggcggcggcgacgcgccgagcagacgcgccgtccttcgctccgcggagctcatcctgtgcatcgcaagagggacgcactgcttggatttcaggccctcggagatcgccgcggccgtcgccgccgccgtggccggcgaagagcacgccgtggatatcgtcgacaaggcttgcacccaccgtgtacataaggagagggtgtcgcgatgccttgaagccatccaggccgccaccgtggccctgccgggcaccaccgtgccgcagccgctgatgaagacggaaggcacgagcagcggccgcagagccgcctcctctggcaccgccaccaccgtgccgcggagccccaccggggtgctggacgctgcaggctgcctcagctacaggagcgatgacacggcagcagctgctgctgctgccgccgcctcctcgcatgcgaccagctcctggcgcgacgaggacgacgacagctcctccccggttgttgtttgcagcaagaggaggaagattagcagatga

SEQ ID NO: 79 - DNA, 1122 bp, Sorghum bicolor
atggcgccgagctgctacgacgtggccgcgtccatgctcctctgcgccgaggagcacagcagcatcctgtgctttgaggaggaagaggaggaggagttgcaagtggtggggagaaagagagcccggtcgccggagccggactacggggacgatttcggcgtggatttgttcccgccgcagtcggaggaatgcgtggccggtctggtggagaaggagcgggaacacatgccgaggtccgactacggcgagaggctgcgcggcggcggcggcgacggcatcgatctctgcgtccgccgggaagccatcgactggatttggaaggtttacacatactacaactttcgtcctctcactgcctacttggcagtgaactatcttgatcgtttcctctcacggtacgagctgccggacggcaaggactggatgacacaactcctctcggtggcgtgcgtttctctagccgccaagatggaggaaactgccgtccctcaatctctggaccttcaggtcggagatgcgcgctatgtgtttgaggccaagacgatccagagaatggagctccttgttctgagcaccctcaattggaggatgcaggccgtgacacctttctcctacatggattacttcctaaacaagctcaatggtggcaacgcggcgccaagaagctggttctttcaatccgcagagcttatcctctgtgcagccagaggaacctgctgcatagggtttaggccgtctgagatcgccgcggcagttgcggcagccgtggtcgtcggagaagggaacgtcgcaggcattgagaacgcctgccttcacgtagacaaggagcgggtgttgctgtgccaggacgcgatccagtccatgtccatggcgtcctcggccattgacactgtgccaccaaagtctgcgagcggcagcggcaggacctccacctcctcccctgtgcctgtgccatggagccctgtaggggtgctggacgctgctggctgcctcagctacaagagcgaagacgatgccgccggggcagcagcgactgttgctgctgcctcacatggggcctctggctcttcaagctcatcgcccccagtgaccagcaaaaggcgaaaactcaccagccgatga

SEQ ID NO: 80 - DNA, 1038 bp, Sorghum bicolor
atgggaatcgtctgcgtcgatgcatcctccacgctgctctgcgaggaggacaggagcaacgcactcggcctcgtcggctgctgcgacgagctgctagaggtggggagcggccttgatggcttggactccgccgacggcgccgtgttgcccgtgcacaccgatgaggccgtgtcggcgttggtggagaaggagatggaccaccaacctcaagagggctatgcggagaggctggagcgcggcggattggagtcctcctggaggagagacgccatggattggatttgcaaggttcattcacactacagctttgcaccactcagtctttaccttgctgtgaattacctggatagattcctctccttgtatgagctcccacacgataagccttggatgcaacagttgttgtcagttgcttgcctatctcttgctgtcaagatggaggagaccgtggtcccttttcctgtggaccttcaggtttgcgatgtgaaatttgagtttgaaggaaagactattgggaggatggaggttcttgtgctgaaaaccctgaagtggagaatgcaggctgtgaccccgtttactttcatcagctacttcctggacaagttcagtgatgggaagccaccgagttttgcactttcctcacggtgtgctgagatcataattggcacactcaaaggctctacattcttgtcattcagaccatctgagattgctgcggcctcggccctagcagtggtttctgagaatcagattgttggctttgcgagtgttctttcagcatctaaagtccctgtaaataaggacatggttgctagatgctatgagctgttgcaagagcaggtgttggtgaagaagagaaggcacatcaatggaagcgcttcagtgccacaaagcccgattggtgtgctggatgcaacatgcttcagctttaggagcgaagatgcaacactaggatcatcacaatcaaacaacatcagtagtagtgacaacaacaatcaagcttccaagaggagaaggctaagcatatcaccaatctga

SEQ ID NO: 81 - DNA, 2218 bp, Zea mays
atggcaaaccctggcgaagggggccttgatagcggccggtcactctggccgcgtcaaccggcgcgtccaatcacatctgccgatccacgatcagacggccagtggctcgcgggacgcctcccaaacgccggatccatccacgcgttcggcaatgctcgcctttcctgcaccagtcgcgacagtccgcctcctccattcccgctccggctgtctcaattttggcgtaccaccgcgtgcgctttcccgaaatactttcgccatctccccgatacaaagcacgaagtggagagggcgcggcacagccaggcagccgcacggcacaactgcaccgcactctgcctcctccgcccgtcctccccccttgtcctcctccgctcggcactgccgcattctgctcttttagccaaacacgcgcaccagcccaccgcccagccggaccagagaggcggagactacagcgccggcgtcgcacggcaggagagggagacgcagccggaaaaaggcgcagactttgacttgctggtgtccggtgggagtgagatacgccggtacagagccatggcaccgagctgctacgacgtggccgcgtccatgctcctctgcgccgaggagcacagcagcatcctgtgttttgaggaggaggaggaggagttggaggcggtcgggagaaagagaggccggtcgccgggctatggggacgatttcggcgtggatttgttcccgccgcagacggaggaatgcgtggccggtctggtggagcgggagcgggagcacatgcctagggcggactatggccagaggctgcgcggcgacggcgtcgatctctgcgtccgccaggaggccatcgactgtatttggaaggtctacacatactacaactttcgtcctcttactgcctacttggcagtgaactatctcgatcgtttcctctcactgtacaagctgccggaaggcaagggctggatgacacaactcctttcggtggcgtgtgtttctctggctgccaagatggaggaaaccgccgtcccgcaatgtctggaccttcaggtcggagatgcacgttttgtgttcgaggcgaagacgatccagagaatggagctccttgttctaaccaccctcaactggaggatgcaggccgtgacacctttctcctatgtggattacttcctaaacaggctcagtggcggcaatgcggccctaagaaattgcctgtttcaatccgcggagcttatcttgtgtgcagctagaggaaccagctgcatagggtttaggccgtctgagatcgcggccgcagttgcagctgctgtggtcggagaagtggacgttgcaggcattgagaacgcctgcgcccacgtagataaggagagggtgttgcggtgccaggaggcgatccagtccatggcgttccctgtgcctgtgccgcagagccctgtgggggtgctggacgcgggctacctcagctacaagagcgaagacgatgccgcggcagcagcgactgctgcttcacatgggggcctctggctcttcaagctcctctccggtgaccagcaaaaggagaaaactcaccagccgatgatgggttgcagtgacctgccaaagtgtgtgcccaaatgatcagaggaaattgactactctgcttactttgatttttttttttagccgcgccactcgtctccgtgatgtgtgaagtgcaacgacgctggtgatgtgtgaagtgccttagcggcaaaaagacgggattttgacatgtcgaggggggcaagaagttgatgaataaaggtgtgaggtggacaacacctaaattgctgagctcttctttgcaagcaccggaggaggtagacagccagcacaaacttggtgtgccacaaagggcgcaccattgctttgtaggaacacaaagctggagggagatcgatgagatgatcagaataaagatggtgtagtcctggagtgggccagatcgtaggcaataatatctacaagaactaggcacactgaccagcctatgttggagtatctgataaattgctttagtaggttctagtattctttctttctttagtttcatcctgaagagaatctcggtgaccgagaaatgtatgtgacaaaataagagaagtcgacactgatgattaaactaagagctaacataaggaaaggaagtgaacaggatccatgacaaagcggagtgggcttagttcagtaataccaatacaac

SEQ ID NO: 82 - DNA, 2079 bp, Zea mays
ccccgctctccactggtctctctcctcctgtttccgcactgcagtggcctagccggcgtcgtcctccccctctctcgctcctctgtcctcccctctccacttgagaagaacacaattaggaaaaaaaggcaaaaaacatttaccttttttctatctgtatattatctgaataaatcaagaggaggaagaggggagggagcgagggagggggaggagtagcaaatccagactccatagcaaccagctcgcgagaaggggaaaagggggaggaagagcttcgcttgtgtattgattgctcgctgctccagtccctgcattcgtgccgtttttggcaagtaggtggcgtggcaagcatggtgccgggctatgactgcgccgcctccgtgctgctgtgcgcggaggacaacgctgctattctcggcctggacgacgatggggaggagtcctcctgggcggccgccgctacgccgccacgtgacaccgtcgccgccgccgccgccgccgccaccggggtcgccgtcgatgggattttgacggagttccccttgctctcggatgactgcgttgcgacgctcgtggagaaggaggtggagcacatgcccgcggaggggtacctccagaagctgcagcgacggcatggggacctggatttggccgccgtcaggaaggacgccatcgattggatttggaaggtcattgagcattacaatttcgcaccgttgactgccgttttgtctgtgaactacctcgatagattcctctccacgtatgagttccctgaaggcagagcttggatgactcagctcttggcagtggcttgcttgtctttggcttcgaaaatcgaagagacttttgtgccactccccttggatttgcaggtagcggaggcaaagtttgtttttgagggaaggaccataaaaaggatggagcttctggtgctaagcaccttaaagtggaggatgcatgctgttactgcttgctcatttgttgaatactttcttcataaattgagtgatcatggtgcaccctccttgcttgcacgctctcgctcttcggaccttgtcttgagcaccgctaaaggtgctgaattcgtggtattcagaccctccgagattgctgccagtgttgcacttgctgctatcggcgaatgcaggagttctgtaattgagagagctgctagtagctgcaaatatttggacaaggagagggttttaagatgccatgaaatgattcaagagaagattactgcgggaagcattgtcctaaagtctgctggatcatcaatctcctctgtgccacaaagcccaataggtgtcctggacgctgcagcctgtctgagtcaacaaagcgatgacgctactgtcgggtctcctgcagtatgttaccatagttcttccacaagcaagaggagaaggatcactagacgtctactctaattgtggtacgcttcaggtgtgctcctcaccgctctaggagtttttgattggttcaaacatcttaaatttagtttggccgctggaggattatggtttagtcaagtagttgctgaatggaacaacaaaacacgcacactacttggtccataaagacaagaaaataactggcagcgtcccgcgagccagcgctgcaatccagttcatgcaagaccctagagtccagggggggtgctggtgtaggtagagagggaacaaggcattcacatacgccgtagagatgagagagcctctcgtatgttttgtacttttgctccttcagtttgcaatgaactatataaacaaggattgccttggggcagtgaacatttgtcggatgaaaagaatcaaaaaggatgggggtcggcagaggaatagaacaatttgatatatttccataaactacagatatgtttcctttttcataatgatgagctatcatttttgttgatggtaacatggtatttggcgtcccgttttgtttgcatcaggccattggttgattgcttccaatgtaccttcattgattatccaatttttgtttgcattgggccattagttgattacttccaatgtaccttcattgattatccaatttttgtttgca

SEQ ID NO: 83 - DNA, 2115 bp, Zea mays
ccctcgtctctatccaaaacccgctccaccaccaccatcactattcactaggcacagcgcccggccgccctacataaaccctgctctcctccactccactagtctctctcctactgtttacacactgcagtggccttgccggcgtcttcctccccctcctctctctcgctcctctgtcctctccacttgataaagaacacaattaggaaaaaataggcaaaaaaacatgtaccttttttctatctatattatctgaataaatcaagaagaggaagaggggagagggagcagggagggggaggagtagcaaatccagactccatagaatcagctcgcaagaaggggaaagggaggaggagcttcgctggtgaattgattgctcgctgctccagtctcgcattcgtgccgttttcggcaagtaggtggcgtggcaagcatggtgcctggctatgactgcgccgcctccgtgctgctgtgcgcggaggacaacgctgctgttctcggcctggacgacgagtcctcttgggcggccgcagctacgccgccacgcgacaccgtcgtcgccgccgccgccgccggggttgccgtcgacgggttcttgacggagttccccttgctctcggatgactgcgttgcggcgctcgtggagaaggaggtggagcacatgcccgcggaggggtacctccagaagctgcagcgacggcatggggacctggatttggccgccgtcaggaaggatgccgtcgactggatttggaaggtcattgaacattacagtttcgcaccgttgactgcagttctgtctgtgaactacctcgatagattcctctccacctatgactttcctgaaggcagagcttggatgactcagctcttagcagtggcatgcttgtctttggcttcgaaaatagaagagacttttgtgccactccctttggatttgcaggtagccgaggcaaagtttgtttttgagggaaggaccattaaaaggatggagcttctggtgctacgcaccttaaagtggaggatgcatgctgttactgcttgttcatttgttgaatactttcttcataaattgagtgaccatggtgcaccctccttgcttgcgcgctctcgctcttccgaccttgtcttgagcactgctaaaggtgctgaattcgtggtattcagaccctcagagattgctgccagtgttgctcttgcggcgatcggggaatgcagcagttctgtaattgagagagctgctactagctgcaactatttggacaaggagagggttttaagatgtcatgaaatgattcaagagaagattgctgtgggaagcattgtcctaaagtctgctggatcatcaatttcctctgtgccacgaagccccataggcgtcctggatgccgctgcctgtctgagtcaacaaagcgatgatgctactgttggatctcctgcagtatgctaccatagttcttccacgagcaagagaagaaggatcactagacgtctactctagttgtggtatgcttcaggtgtgctcctcaccgttctaggagtttttgattggttcattcatcttaaatttagtttggcctctcaaggattatggtttcgtcaagtagttgcctgaatggaacaacaaaacatgcacactactcagtgttccatataaagagagagagaaaaataacaagcagcgtcctgcgagccagtgttgcgattccagttcatgcaattggcatccgtaaggggaatgcaagcgcaagacactagagtccagggatgctggtgtaggtagagagggggaacaaggaatttacatacggcatagagatgagagctctctcgtaccattttgtaccttcaattcgcaatgaactttaggcaaggattgccttgggcaattgaacatttgtcgggtgagaagaatccaaagatggatcggcagaggaatagaacaatttgatatatttccataaactacagatatgttttattttttcttaatggtgagctgtcacttgttgatagtaatatggtattcggcgttccgttttggttgcgctggggccattggttgattatgaccaatgtaccttcattggttattcttgattgcgagtattt

SEQ ID NO: 84 - DNA, 2152 bp, Zea mays
cgctccggatgtctccagtttcggcgtaccgccgcgtgcgcttcccaaaacactcccgtctccccgtgcccgatacaaagcgcgagggggcgaaagcacgccacaactgcaccgcactctctgcctccctccgtccgtccgtcctcccgtcctcttccttgtgccttgtcctgcttctccactcgccactgccgcattctgcccaagtttgccgtactgccgcattccaccagccacccaccaggccaccacccagcactccagccgccagaacagagtctacggcgccgccgtcgcacgacaggagagggagagggagagagacgcgggctttgacttgccgccggtgcgtccgtgcgtgcctggtgggaggagtgggagacgccggtacagtacaggagccatggcgccgagctgctacgacgcggcagcgtccatgctcctctgcgccgaggagcacagcagcatcctgtggtacgacgaggaggaggaggagctggaggcggtcgggagaaggagaggccggtcgccgggctacggggacgacttcggcgcggacttgttcccgccgcagtcggaggaatgcgtggccggtctggtggagcgggaacgggaccacatgccggggccgtgctacggcgacaggctgcgcggcggcggcggctgtctctgcgtccgccgggaggccgtcgactggatttggaaggcttacacgcaccacaggttccgccctctcactgcctacttggcagtgaactacctcgatcgcttcctctcgctgtctgaggtgccggactgcaaggactggatgacgcagctcctcgcggtggcgtgcgtttctctggccgccaagatggaggaaaccgccgtcccgcagtgcctggaccttcaggaggtcggagacgcgcggtacgtgttcgaggcgaagacggtccagaggatggagctcctggttctaacaaccctcaactggaggatgcatgccgtgacgccgttctcctacgtggattacttcctgaacaagctcaacaacggcggcagcacggcgccgaggagctgctggctcttgcagtccgcggagcttatcttgcgtgcggccagaggaaccggctgcgtcgggttcaggccgtccgagatcgccgccgcggttgcagccgccgtggccggagacgtggacgacgcggacggcgtcgagaacgcctgctgcgctcacgtagataaggagcgggtgttgcggtgccaggaagcgatcgggtccatggcgtcctcggcggccattgacgacgctaccgtgccaccgaaatctgcgagacgcaggagctcccccgtgcccgtgccgcagagccctgtgggggtgctggacgcggctccctgcctcagctacaggagcgaagaggcagcgactgcgactgcgactgcgacttctgctgcctcacatggggcccctggctcttcaagctcgtcctcgacctccccggtgaccagcaaaaggaggaaactcgccagccgatgtgatggatcgtgcagtgaccggtcaaagcgcgcgcccgcccaatggaccaaagagtgaattgactagggcgtctgcttgctttctgatcaaagagtgcattgagaggcggcaaaatggaggaataaaggggattttggcatgacgagggcaaaggagttgatgaataaagacgcgacgaggtggacaacacctaaattgccgatcttttctttgcaaggggagtaggggacctgcttgggcctgggggagggtagtagacagcccagcacaaaaacctggttggtgtgccacgaccacaatgggcgcgccagccatggctttgtaggaaacacaagggcgctagaggagatccgatgggatgactcagaataaagatagtggagggaccagaccgtatgcagtatgtgcaacaactaggcactggcatgcttatgctcaagtaatctgataacttgaatgttgtgtatccgacaaactgcttctgtgaagagagaaatgcaggtagacgatgaatgtatgtgacaaaaagaatgtccgacccagatgagaaaataaaatatgaatccatgacaaggggatgtgggtttagttctatccatcatttgtttttaattttaacttaatattgtcctgcctgcc

SEQ ID NO: 85 - DNA, 1388 bp, Zea mays
ccgaaaatgcccccgcctactctgcacgccggttcatacaaaaggggcctcacgtcacggcacacagcacgcagcacatcgctcactccgtcactcgctcctcctccactcctcgccttcctcggtcgcatcaagaacacgagcaggaaggagaagaggaggagtcctatcagagccagacagccaatcagtatctgtaccattaccgttcgggcaccagattaccaaaatcctgcagaggggaatggcgccgagcagctacgagatggcggcttccaccctgctgtgcggcgaggacagcagcagcatcctggacctcgaagcggggggccaggaggaggaggaggaggtgctgctggcgcggagcaggacgcgcggggagcccagcgtggtcttccccgtgccgtccgaggaatgcgtcgccggtttcgtggaggcggaggcggcgcacatgccgcgggaggactacgccgagaggctgcgcggcgggggcacggatctccgcgtccggacggacgccatcgactggatttggaaggttcacgcgtactacggtttcggccctctcaccgcctgcttggccgtcaactacctggaccgcttcctctcgctctaccagcttccggaaggcaagtcttggacgacgcagctgctgtccgtggcgtgcttgtccctggctgccaagatggaggagacctacgttcctccgtctctggacctgcaggtcggggacgcgcggtacgtgttcgaggcgaagacggtgcagaggatggagctgctggtcctcagcacgctcagatggaggatgcgagcggtcacccccttctcgtacatcgactacttcctccaccggctcaaagacggcggtgcgccgagcagacgcgccgtcctccgatccgcggagctcatcctgcgcgtcgcgagaggaacgtgctgcctgggtttcaggccctcggaggtcgccgcggctgtcgccgccgccgtggccggcgaggagcacgccgtggatatcgacaaggcttgcacccaccgcgtgcacgaggtacggcgtgtgcctgtccccggccacttctcgcgagtcttgtcgtcagattcaatgcgatgcgatgcaatacgttaagcgtgtaccgcatggatccaaatccaagtcgtaggtttgcagctgtacttgacttgtgcagctactgagctactactactaggcacacgcacctgcccaggtcaggtgcgtgagccgcatttacagccatggcgactgatgctttatttgttgctttgcgctgcatgcgggcggttgcaggagagggtgtcgcgatgcctcgaagcgatccaggccaccgtggccctgctggcgcctgcacagccgctgaaagctgaaggcccgagca

SEQ ID NO: 86 - protein, 361 aa, Arabidopsis thaliana
MAENLACGETSESWIIDNDDDDINYGGGFTNEIDYNHQLFAKDDNFGGNGSIPMMGSSSSSLSEDRIKEMLVREIEFCPGTDYVKRLLSGDLDLSVRNQALDWILKVCAHYHFGHLCICLSMNYLDRFLTSYELPKDKDWAAQLLAVSCLSLASKMEETDVPHIVDLQVEDPKFVFEAKTIKRMELLVVTTLNWRLQALTPFSFIDYFVDKISGHVSENLIYRSSRFILNTTKAIEFLDFRPSEIAAAAAVSVSISGETECIDEEKALSSLIYVKQERVKRCLNLMRSLTGEENVRGTSLSQEQARVAVRAVPASPVGVLEATCLSYRSEERTVESCTNSSQSSPDNNNNNNNSNKRRRKQ

SEQ ID NO: 87 - protein, 308 aa, Arabidopsis thaliana
MAEENLELSLLCTESNVDDEGMIVDETPIEISIPQMGFSQSESEEIIMEMVEKEKQHLPSDDYIKRLRSGDLDLNVGRRDALNWIWKACEVHQFGPLCFCLAMNYLDRFLSVHDLPSGKGWILQLLAVACLSLAAKIEETEVPMLIDLQVGDPQFVFEAKSVQRMELLVLNKLKWRLRAITPCSYIRYFLRKMSKCDQEPSNTLISRSLQVIASTTKGIDFLEFRPSEVAAAVALSVSGELQRVHFDNSSFSPLFSLLQKERVKKIGEMIESDGSDLCSQTPNGVLEVSACCFSFKTHDSSSSYTHLS

SEQ ID NO: 88 - protein, 298 aa, Arabidopsis thaliana
MAEFMEPNLVSNFDDEKSNSVDTRSIFQMGFPLESEEIVREMIEKERQHSPRDDYLKRLRNGDLDFNVRIQALGWIWKACEELQFGPLCICLAMNYLDRFLSVHDLPSGKAWTVQLLAVACLSLAAKIEETNVPELMQLQVGAPMFVFEAKSVQRMELLVLNVLRWRLRAVTPCSYVRYFLSKINGYDQEPHSRLVTRSLQVIASTTKGIDFLEFRASEIAAAVALSVSGEHFDKFSFSSSFSSLEKERVKKIGEMIERDGSSSSSQTPNNTVLQFKSRRYSHSLSTASVSSSLTSLS

SEQ ID NO: 89 - protein, 328 aa, Glycine max
MAPSFDCVSSLLCAEDNSIFDENDYGDIVETLVKSDECLRLMVEKEWDHLPNGDYVNRLRSGDLDFGARKEAIDWIEKVQQHFGFGPLCAYLSINYLDRFLSAYELPKHRAWTMQLLAVGCLSLAAKMEETDVPFSLDLQVGESKYIFEAKTIQRMELLVLSTLRWRMQAITPFSFIDHFLYKINDDQSPIGASILQSIQLILSTVRGIDFLEFRPSEIAAAVAISVVGEGQTVHTEKAISVLIQLVEKERVLKCVKMIQELASNSGGSAKGASASVSVPSVPESPLGVLVTACFSYKSDDTNAASYANSSHNISPDAKRRKLNKTFG

SEQ ID NO: 90 - protein, 357 aa, Glycine max
MAPSFDCVSSLLCVEDNSIFDENDYGGSVEVLEDAWQDPRYRRNLSQSENLDVPNGWFQLQSDECLRLMVEKEWDHLPNGDYRNKLRSGDLDFEARKEAIDWIQKVQEHFGFGPVCAYLSINYLDRFLSAYELPKHRTWTMQLLAVGCLSLAAKMEETDAPMSLDLQVGESKYIFEAKTIQRMELLVLSTLRWRMQAITPFSFIDHFLYKINDDQSPIGASILQSIQLILSTVRGIDFLEFRPSEIAAAVAISVVGEGQTVQTEKAISVLIQLVEKERVLKCVKLIQELASNSGGGSAKGDSASVSVPSVPQSPIGVLNTECFSYKSDDTNAASCANTSHNNSPDAKRRKLNKTFGE

SEQ ID NO: 91 - protein, 361 aa, Glycine max
MAHNSDSATSNLLLCSENSSTCFDDDLECCDAADGSNSRISHQFWDHHEGGGGGGSELLACFVAQSEETVRAMVEREREHLPRDDYLMRLRSGELDLGVRREAIDWICKAHSYFGFGPLSFCLAVNYLDRFLSVFDLPRGVTWTVQLLAVACLSIAAKMEEIKVPQSVDLQVGEPKFVFEARTIQKMELLVLSTLGWKMCAITPCSFIDYFLGKITCEQHPAKSSVSISVQLILGIIMGIDYLEFRPSEIAAAVAVSVLKELQAIEIDKAIIDLLVVEKVRVLKCVELIRDLSLINVAASLGSKVPYVPQSPIGVLDAGCLSYKSDELTVGSCPNSSHNISNPNPTKRSKPDGPSNGTSNS

SEQ ID NO: 92 - protein, 310 aa, Glycine max
CLIKDNHGSEHFWDFSVLSDETVMDLVGRESEHLPHVGYLKRLLSGDLDLSVRNEALDWIWKAHAYYGFGPCSLCLSVNYLDRFLSVYELPRGKSWSIQLLAVACLSIAAKMEEIKVPPFVDLQVGEPKFVFEAKTIQRMELLVLSTLRWQMQASTPFSFLDYFLRKINCDQVIVKSSIMRSVGPILNIIKCINFLEFRPSEIAAAVAISVSREIQAEEIDKALQMQAEETAAAFTAFCFLSYEGLELIKDLSLMQDSANLGNNLASFVPQSPIGVLDAACLSSISDELTVGSYRDSSLDTPNSKRRKSD

SEQ ID NO: 93 - protein, 436 aa, Oryza sativa
PASVGSCPVSASCPAQNALLLPSTRLCIQRERIPPLLTCPLLLFHTSPPTKIKSKNSKSKKRRRETTQSITSLARFISKEMAALTSYEMAASILLCAEDSSSVLGFGGEEEEEEEDVVAGKRARCAGPPPPPCVDVAGVDFAVPSEECVARLVETEADHMPREDYAERLRAGGGDGDLDLRVRMDAIDWIWKVHSYYSFAPLTACLAVNYLDRFLSLYQLPDGKDWMTQLLAVACLSLAAKMEETDVPQSLDLQVGEERYVFEAKTIQRMELLVLSTLKWRMQAVTPFSYVDYFLRELNGGDPPSGRSALLSSELILCIARGTECLGFRPSEIAAAVAAAVVGEEHAAFSHVNKERMSHCQEVIQAMELIHPKPSSPSRVFVSSSIPRSPTGVLDAAGCLSYRSDDSAVASHYAASSWGYEHDSSPVSSKRRKISR

SEQ ID NO: 94 - protein, 399 aa, Oryza sativa
PKKKTNRRGEGRGGGEMAPSSSSCHDAAASMLLCAEDNSSILWLEDEEGEVGERRSGGCRSMVGDLAAGGGGGSGGGGVEEEEDMFPRQSEECVASLVEREQAHMPRADYGERLRGGGGDVDLRVRSEAIGWIWEVYTYYNFSSVTAYLAVNYLDRFLSQYELPEGRDWMTQLLSVACLSIAAKMEETVVPQCLDLQIGEPRFLFEVETIHRMELLVLTNLNWRMQAVTPFSYIDYFLRKLNSGNAAPRSWLLRSSELILRIAAGTGFLEFRPSEIAAAVAATVAGEATGVVEEDIAEAFTHVDKGRVLQCQEAIQDHHYSMATINTVQPKPASTRRGSASASSSSVPESPVAVLDAGCLSYKSDDTDAATIASHGGGRRKSCFDSSPVTSKKRRKLSR

SEQ ID NO: 95 - protein, 381 aa, Oryza sativa
INTSITCANSTRGGGVVSCDLGLIDMGVLCFGASNILLCAEDSSSVLGLGGFGGGGGEVAAELGCGGGGGFDFFGFGGGAVFPIDSDEFVALLVEKEMDHQPQRGYLEKLELGGLECSWRKDAIDWICKVHSYYNFGPLSLYLAVNYLDRFLSSFNLPHDESWMQQLLSVSCLSLATKMEETVVPLPMDLQVFDAEYVFEARHIKRMELIVMKTLKWRLQAVTPFSFIGYFLDKFNEGKPPSYTLASWCSDLTVGTLKDSRFLSFRPSEIAAAVVLAVLAENQFLVFNSALGESEIPVNKEMVMRCYELMVEKALVKKIRNSNASSSVPHSPITVLDAACFSFRSDDTTLGSSQSNSNNKDYNSQDSAPASKRRRLNTTPI

SEQ ID NO: 96 - protein, 378 aa, Sorghum bicolor
MAPMSSYEMAASILLCAEDSSSILDLEAEAEEEEVMLAPRSRTRTRGEPSVEFPVPSEECVDGFVEAEAAHMPREDYAERLRGGGMDLRVRMDAIDWIWKVHRYYGFGPLTACLAVNYLDRFLSLYQLPEGKAWTTQLLSVACLSLAAKMEETYVPPSLDLQVGDARYVFEAKTIQRMELLVLSTLKWRMQAVTPFSYIDYFLHRLNGGGGDAPSRRAVLRSAELILCIARGTHCLDFRPSEIAAAVAAAVAGEEHAVDIVDKACTHRVHKERVSRCLEAIQAATVALPGTTVPQPLMKTEGTSSGRRAASSGTATTVPRSPTGVLDAAGCLSYRSDDTAAAAAAAAASSHATSSWRDEDDDSSSPVVVCSKRRKISR

SEQ ID NO: 97 - protein, 373 aa, Sorghum bicolor
MAPSCYDVAASMLLCAEEHSSILCFEEEEEEELQVVGRKRARSPEPDYGDDFGVDLFPPQSEECVAGLVEKEREHMPRSDYGERLRGGGGDGIDLCVRREAIDWIWKVYTYYNFRPLTAYLAVNYLDRFLSRYELPDGKDWMTQLLSVACVSLAAKMEETAVPQSLDLQVGDARYVFEAKTIQRMELLVLSTLNWRMQAVTPFSYMDYFLNKLNGGNAAPRSWFFQSAELILCAARGTCCIGFRPSEIAAAVAAAVVVGEGNVAGIENACLHVDKERVLLCQDAIQSMSMASSAIDTVPPKSASGSGRTSTSSPVPVPWSPVGVLDAAGCLSYKSEDDAAGAAATVAAASHGASGSSSSSPPVTSKRRKLTSR

SEQ ID NO: 98 - protein, 345 aa, Sorghum bicolor
MGIVCVDASSTLLCEEDRSNALGLVGCCDELLEVGSGLDGLDSADGAVLPVHTDEAVSALVEKEMDHQPQEGYAERLERGGLESSWRRDAMDWICKVHSHYSFAPLSLYLAVNYLDRFLSLYELPHDKPWMQQLLSVACLSLAVKMEETVVPFPVDLQVCDVKFEFEGKTIGRMEVLVLKTLKWRMQAVTPFTFISYFLDKFSDGKPPSFALSSRCAEIIIGTLKGSTFLSFRPSEIAAASALAVVSENQIVGFASVLSASKVPVNKDMVARCYELLQEQVLVKKRRHINGSASVPQSPIGVLDATCFSFRSEDATLGSSQSNNISSSDNNNQASKRRRLSISPI

SEQ ID NO: 99 - protein, 537 aa, Zea mays
MANPGEGGLDSGRSLWPRQPARPITSADPRSDGQWLAGRLPNAGSIHAFGNARLSCTSRDSPPPPFPLRLSQFWRTTACAFPKYFRHLPDTKHEVERARHSQAAARHNCTALCLLRPSSPLVLLRSALPHSALLAKHAHQPTAQPDQRGGDYSAGVARQERETQPEKGADFDLLVSGGSEIRRYRAMAPSCYDVAASMLLCAEEHSSILCFEEEEEELEAVGRKRGRSPGYGDDFGVDLFPPQTEECVAGLVEREREHMPRADYGQRLRGDGVDLCVRQEAIDCIWKVYTYYNFRPLTAYLAVNYLDRFLSLYKLPEGKGWMTQLLSVACVSLAAKMEETAVPQCLDLQVGDARFVFEAKTIQRMELLVLTTLNWRMQAVTPFSYVDYFLNRLSGGNAALRNCLFQSAELILCAARGTSCIGFRPSEIAAAVAAAVVGEVDVAGIENACAHVDKERVLRCQEAIQSMAFPVPVPQSPVGVLDAGYLSYKSEDDAAAAATAASHGGLWLFKLLSGDQQKEKTHQPMMGCSDLPKCVPK

SEQ ID NO: 100 - protein, 360 aa, Zea mays
MVPGYDCAASVLLCAEDNAAILGLDDDGEESSWAAAATPPRDTVAAAAAAATGVAVDGILTEFPLLSDDCVATLVEKEVEHMPAEGYLQKLQRRHGDLDLAAVRKDAIDWIWKVIEHYNFAPLTAVLSVNYLDRFLSTYEFPEGRAWMTQLLAVACLSLASKIEETFVPLPLDLQVAEAKFVFEGRTIKRMELLVLSTLKWRMHAVTACSFVEYFLHKLSDHGAPSLLARSRSSDLVLSTAKGAEFVVFRPSEIAASVALAAIGECRSSVIERAASSCKYLDKERVLRCHEMIQEKITAGSIVLKSAGSSISSVPQSPIGVLDAAACLSQQSDDATVGSPAVCYHSSSTSKRRRITRRLL

SEQ ID NO: 101 - protein, 355 aa, Zea mays
MVPGYDCAASVLLCAEDNAAVLGLDDESSWAAAATPPRDTVVAAAAAGVAVDGFLTEFPLLSDDCVAALVEKEVEHMPAEGYLQKLQRRHGDLDLAAVRKDAVDWIWKVIEHYSFAPLTAVLSVNYLDRFLSTYDFPEGRAWMTQLLAVACLSLASKIEETFVPLPLDLQVAEAKFVFEGRTIKRMELLVLRTLKWRMHAVTACSFVEYFLHKLSDHGAPSLLARSRSSDLVLSTAKGAEFVVFRPSEIAASVALAAIGECSSSVIERAATSCNYLDKERVLRCHEMIQEKIAVGSIVLKSAGSSISSVPRSPIGVLDAAACLSQQSDDATVGSPAVCYHSSSTSKRRRITRRLL

SEQ ID NO: 102 - protein, 388 aa, Zea mays
MAPSCYDAAASMLLCAEEHSSILWYDEEEEELEAVGRRRGRSPGYGDDFGADLFPPQSEECVAGLVERERDHMPGPCYGDRLRGGGGCLCVRREAVDWIWKAYTHHRFRPLTAYLAVNYLDRFLSLSEVPDCKDWMTQLLAVACVSLAAKMEETAVPQCLDLQEVGDARYVFEAKTVQRMELLVLTTLNWRMHAVTPFSYVDYFLNKLNNGGSTAPRSCWLLQSAELILRAARGTGCVGFRPSEIAAAVAAAVAGDVDDADGVENACCAHVDKERVLRCQEAIGSMASSAAIDDATVPPKSARRRSSPVPVPQSPVGVLDAAPCLSYRSEEAATATATATSAASHGAPGSSSSSSTSPVTSKRRKLASRCDGSCSDRSKRAPAQWTKE

SEQ ID NO: 103 - protein, 291 aa, Zea mays
MAPSSYEMAASTLLCGEDSSSILDLEAGGQEEEEEVLLARSRTRGEPSVVFPVPSEECVAGFVEAEAAHMPREDYAERLRGGGTDLRVRTDAIDWIWKVHAYYGFGPLTACLAVNYLDRFLSLYQLPEGKSWTTQLLSVACLSLAAKMEETYVPPSLDLQVGDARYVFEAKTVQRMELLVLSTLRWRMRAVTPFSYIDYFLHRLKDGGAPSRRAVLRSAELILRVARGTCCLGFRPSEVAAAVAAAVAGEEHAVDIDKACTHRVHEVRRVPVPGHFSRVLSSDSMRCDAIR

That which is claimed:

1. A method of producing a doubled haploid plant, comprising:
a) providing a first plant, wherein the first plant comprises at least one introduced genetic chromosome doubling agent;
b) crossing the first plant with a second plant, wherein the at least one introduced genetic chromosome doubling agent of the first plant induces chromosome doubling of a fertilized egg cell of the second plant in the absence of an exogenously applied chemical or biochemical chromosome doubling agent;
c) obtaining a diploidized embryo comprising a pair of chromosomes inherited from the second plant and not comprising the introduced genetic chromosome doubling agent; and
d) regenerating a diploid plant from the diploidized embryo.

2. The method of claim 1, wherein the first plant is a haploid inducer.

3. The method of claim 2, wherein the haploid inducer comprises a loss-of-function mutation in a patatin-like phospholipase A2α gene.

4. The method of claim 3, wherein the loss-of-function mutation in the patatin-like phospholipase A2α gene is the MATRILINEAL (MATL) gene.

5. The method of claim 2, wherein the first plant expresses a marker gene.

6. The method of claim 5, wherein the marker gene is selected from a selectable marker, a reporter gene, a visible endogenous morphological marker, and combinations thereof.

7. The method of claim 6 wherein the selectable marker is selected from the group consisting of GUS, PMI, PAT, and combinations thereof.

8. The method of claim 6, wherein the reporter gene is selected from the group consisting of GFP, RFP, CFP, and combinations thereof.

9. The method of claim 6, wherein the visible endogenous morphological marker is selected from the group consisting of B1, R-nj, R1-scm, anthocyanin pigments, and combinations thereof.

10. The method of claim 1, wherein the genetic chromosome doubling agent is a genetic chromosome doubling polypeptide.

11. The method of claim 10, wherein the genetic chromosome doubling polypeptide is selected from the group consisting of:
a) a polypeptide allowing replication of a genome without cell division;
b) a polypeptide destabilizing tubulin polymerization;
c) a polypeptide altering cell cycle regulation; and
d) combinations of the foregoing.

12. The method of claim 11, wherein the genetic chromosome doubling polypeptide allowing replication of the genome without cell division is selected from the group consisting of:
a) an amino acid sequence having at least 70% (e.g., at least 80%, 90%, 95%, or 98%) identical to SEQ ID NO: 24;
b) an amino acid sequence having at least 70% (e.g., at least 80%, 90%, 95%, or 98%) identical to SEQ ID NO: 25;
c) an amino acid sequence having at least 70% (e.g., at least 80%, 90%, 95%, or 98%) identical to SEQ ID NO: 26; or
d) an amino acid sequence having at least 70% (e.g., at least 80%, 90%, 95%, or 98%) identical to SEQ ID NO: 2.

13. The method of claim 11, wherein the genetic chromosome doubling polypeptide destabilizing tubulin polymerization is selected from the group consisting of:
a) an amino acid sequence having at least 70% (e.g., at least 80%, 90%, 95%, or 98%) identical to SEQ ID NO: 3; or
b) an amino acid sequence having at least 70% (e.g., at least 80%, 90%, 95%, or 98%) identical to SEQ ID NO: 28.

14. The method of claim 11, wherein the genetic chromosome doubling polypeptide altering cell cycle regulation is selected from the group consisting of:
a) an amino acid sequence having at least 70% (e.g., at least 80%, 90%, 95%, or 98%) identical to SEQ ID NO: 23;
b) an amino acid sequence having at least 70% (e.g., at least 80%, 90%, 95%, or 98%) identical to SEQ ID NO: 86;
c) an amino acid sequence having at least 70% (e.g., at least 80%, 90%, 95%, or 98%) identical to SEQ ID NO: 87;
d) an amino acid sequence having at least 70% (e.g., at least 80%, 90%, 95%, or 98%) identical to SEQ ID NO: 88;
e) an amino acid sequence having at least 70% (e.g., at least 80%, 90%, 95%, or 98%) identical to SEQ ID NO: 89;
f) an amino acid sequence having at least 70% (e.g., at least 80%, 90%, 95%, or 98%) identical to SEQ ID NO: 90;
g) an amino acid sequence having at least 70% (e.g., at least 80%, 90%, 95%, or 98%) identical to SEQ ID NO: 91;
h) an amino acid sequence having at least 70% (e.g., at least 80%, 90%, 95%, or 98%) identical to SEQ ID NO: 92;
i) an amino acid sequence having at least 70% (e.g., at least 80%, 90%, 95%, or 98%) identical to SEQ ID NO: 93;
j) an amino acid sequence having at least 70% (e.g., at least 80%, 90%, 95%, or 98%) identical to SEQ ID NO: 94;
k) an amino acid sequence having at least 70% (e.g., at least 80%, 90%, 95%, or 98%) identical to SEQ ID NO: 95;
l) an amino acid sequence having at least 70% (e.g., at least 80%, 90%, 95%, or 98%) identical to SEQ ID NO: 96;
m) an amino acid sequence having at least 70% (e.g., at least 80%, 90%, 95%, or 98%) identical to SEQ ID NO: 97;
n) an amino acid sequence having at least 70% (e.g., at least 80%, 90%, 95%, or 98%) identical to SEQ ID NO: 98;
o) an amino acid sequence having at least 70% (e.g., at least 80%, 90%, 95%, or 98%) identical to SEQ ID NO: 99;
p) an amino acid sequence having at least 70% (e.g., at least 80%, 90%, 95%, or 98%) identical to SEQ ID NO: 100;
q) an amino acid sequence having at least 70% (e.g., at least 80%, 90%, 95%, or 98%) identical to SEQ ID NO: 101;
r) an amino acid sequence having at least 70% (e.g., at least 80%, 90%, 95%, or 98%) identical to SEQ ID NO: 102; or
s) an amino acid sequence having at least 70% (e.g., at least 80%, 90%, 95%, or 98%) identical to SEQ ID NO: 103.

15. A method of producing a doubled haploid inducer (DHI) plant, the method comprising:
a) providing a transformable cell or tissue from a non-transgenic haploid inducer plant;
b) transforming the cell or tissue with a heterologous DNA construct comprising a genetic chromosome doubling agent; and
c) obtaining a double haploid inducer (DHI) line comprising the introduced genetic chromosome doubling agent.

16. The method of claim 15, wherein the non-transgenic haploid inducer comprises a loss-of-function mutation in a patatin-like phospholipase A2α gene.

17. The method of claim 16, wherein the loss-of-function mutation in the patatin-like phospholipase A2α gene is the MATRILINEAL (MATL) gene.

18. The method of claim 15, wherein the genetic chromosome doubling agent is selected from the group consisting of:
a) a polypeptide allowing replication of a genome without cell division;
b) a polypeptide destabilizing tubulin polymerization;
c) a polypeptide altering cell cycle regulation; and
d) combinations of the foregoing.

19. The method of claim 18, wherein the genetic chromosome doubling polypeptide allowing replication of the genome without cell division is selected from the group consisting of:
a) an amino acid sequence having at least 70% (e.g., at least 80%, 90%, 95%, or 98%) identical to SEQ ID NO: 24;
b) an amino acid sequence having at least 70% (e.g., at least 80%, 90%, 95%, or 98%) identical to SEQ ID NO: 25;
c) an amino acid sequence having at least 70% (e.g., at least 80%, 90%, 95%, or 98%) identical to SEQ ID NO: 26; or
d) an amino acid sequence having at least 70% (e.g., at least 80%, 90%, 95%, or 98%) identical to SEQ ID NO: 2.

20. The method of claim 18, wherein the genetic chromosome doubling polypeptide destabilizing tubulin polymerization is selected from the group consisting of:
a) an amino acid sequence having at least 70% (e.g., at least 80%, 90%, 95%, or 98%) identical to SEQ ID NO: 3; or
b) an amino acid sequence having at least 70% (e.g., at least 80%, 90%, 95%, or 98%) identical to SEQ ID NO: 28.

21. The method of claim 18, wherein the genetic chromosome doubling polypeptide altering cell cycle regulation is selected from the group consisting of:
a) an amino acid sequence having at least 70% (e.g., at least 80%, 90%, 95%, or 98%) identical to SEQ ID NO: 23;
b) an amino acid sequence having at least 70% (e.g., at least 80%, 90%, 95%, or 98%) identical to SEQ ID NO: 86;
c) an amino acid sequence having at least 70% (e.g., at least 80%, 90%, 95%, or 98%) identical to SEQ ID NO: 87;
d) an amino acid sequence having at least 70% (e.g., at least 80%, 90%, 95%, or 98%) identical to SEQ ID NO: 88;
e) an amino acid sequence having at least 70% (e.g., at least 80%, 90%, 95%, or 98%) identical to SEQ ID NO: 89;
f) an amino acid sequence having at least 70% (e.g., at least 80%, 90%, 95%, or 98%) identical to SEQ ID NO: 90;
g) an amino acid sequence having at least 70% (e.g., at least 80%, 90%, 95%, or 98%) identical to SEQ ID NO: 91;
h) an amino acid sequence having at least 70% (e.g., at least 80%, 90%, 95%, or 98%) identical to SEQ ID NO: 92;
i) an amino acid sequence having at least 70% (e.g., at least 80%, 90%, 95%, or 98%) identical to SEQ ID NO: 93;
j) an amino acid sequence having at least 70% (e.g., at least 80%, 90%, 95%, or 98%) identical to SEQ ID NO: 94;
k) an amino acid sequence having at least 70% (e.g., at least 80%, 90%, 95%, or 98%) identical to SEQ ID NO: 95;
l) an amino acid sequence having at least 70% (e.g., at least 80%, 90%, 95%, or 98%) identical to SEQ ID NO: 96;
m) an amino acid sequence having at least 70% (e.g., at least 80%, 90%, 95%, or 98%) identical to SEQ ID NO: 97;
n) an amino acid sequence having at least 70% (e.g., at least 80%, 90%, 95%, or 98%) identical to SEQ ID NO: 98;
o) an amino acid sequence having at least 70% (e.g., at least 80%, 90%, 95%, or 98%) identical to SEQ ID NO: 99;
p) an amino acid sequence having at least 70% (e.g., at least 80%, 90%, 95%, or 98%) identical to SEQ ID NO: 100;
q) an amino acid sequence having at least 70% (e.g., at least 80%, 90%, 95%, or 98%) identical to SEQ ID NO: 101;
r) an amino acid sequence having at least 70% (e.g., at least 80%, 90%, 95%, or 98%) identical to SEQ ID NO: 102; or
s) an amino acid sequence having at least 70% (e.g., at least 80%, 90%, 95%, or 98%) identical to SEQ ID NO: 103.

22. A method of producing a doubled haploid inducer (DHI) line, the method comprising:
a) providing a transformed first haploid inducer line comprising a heterologous DNA construct comprising a genetic chromosome doubling agent;
b) providing a second haploid inducer line containing a marker;
c) crossing the first haploid inducer line with the second haploid inducer line to produce a combination of maternal and diploid embryos;
d) selecting the maternal embryos based on the absence of the selectable marker from the second haploid inducer line; and
e) obtaining a double haploid inducer (DHI) line comprising the introduced genetic chromosome doubling agent, thereby producing the DHI line.

23. The method of claim 22, wherein the first haploid inducer comprises a loss-of-function mutation in a patatin-like phospholipase A2α gene.

24. The method of claim 23, wherein the loss-of-function mutation in the patatin-like phospholipase A2α gene is the MATRILINEAL (MATL) gene.

25. The method of claim 22, wherein the marker is selected from a selectable marker, a reporter gene, a visible endogenous morphological marker, and combinations thereof.

26. The method of claim 22 wherein the selectable marker is selected from the group consisting of GUS, PMI, PAT, and combinations thereof.

27. The method of claim 22, wherein the reporter gene is selected from the group consisting of GFP, RFP, CFP, and combinations thereof.

28. The method of claim 22, wherein the visible endogenous morphological marker is selected from the group consisting of B1, R-nj, R1-scm, anthocyanin pigments, and combinations thereof.

29. The method of claim 22, wherein the genetic chromosome doubling agent is a genetic chromosome doubling polypeptide.

30. The method of claim 29, wherein the genetic chromosome doubling polypeptide is selected from the group consisting of:
a) a polypeptide allowing replication of a genome without cell division;
b) a polypeptide destabilizing tubulin polymerization;
c) a polypeptide altering cell cycle regulation; and
d) combinations of the foregoing.

31. The method of claim 30, wherein the genetic chromosome doubling polypeptide allowing replication of the genome without cell division is selected from the group consisting of:
a) an amino acid sequence having at least 70% (e.g., at least 80%, 90%, 95%, or 98%) identical to SEQ ID NO: 24;
b) an amino acid sequence having at least 70% (e.g., at least 80%, 90%, 95%, or 98%) identical to SEQ ID NO: 25;
c) an amino acid sequence having at least 70% (e.g., at least 80%, 90%, 95%, or 98%) identical to SEQ ID NO: 26; or
d) an amino acid sequence having at least 70% (e.g., at least 80%, 90%, 95%, or 98%) identical to SEQ ID NO: 2.

32. The method of claim 30, wherein the genetic chromosome doubling polypeptide destabilizing tubulin polymerization is selected from the group consisting of:
a) an amino acid sequence having at least 70% (e.g., at least 80%, 90%, 95%, or 98%) identical to SEQ ID NO: 3; or
b) an amino acid sequence having at least 70% (e.g., at least 80%, 90%, 95%, or 98%) identical to SEQ ID NO: 28.

33. The method of claim 30, wherein the genetic chromosome doubling polypeptide altering cell cycle regulation is selected from the group consisting of:
a) an amino acid sequence having at least 70% (e.g., at least 80%, 90%, 95%, or 98%) identical to SEQ ID NO: 23;
b) an amino acid sequence having at least 70% (e.g., at least 80%, 90%, 95%, or 98%) identical to SEQ ID NO: 86;
c) an amino acid sequence having at least 70% (e.g., at least 80%, 90%, 95%, or 98%) identical to SEQ ID NO: 87;
d) an amino acid sequence having at least 70% (e.g., at least 80%, 90%, 95%, or 98%) identical to SEQ ID NO: 88;
e) an amino acid sequence having at least 70% (e.g., at least 80%, 90%, 95%, or 98%) identical to SEQ ID NO: 89;
f) an amino acid sequence having at least 70% (e.g., at least 80%, 90%, 95%, or 98%) identical to SEQ ID NO: 90;
g) an amino acid sequence having at least 70% (e.g., at least 80%, 90%, 95%, or 98%) identical to SEQ ID NO: 91;
h) an amino acid sequence having at least 70% (e.g., at least 80%, 90%, 95%, or 98%) identical to SEQ ID NO: 92;
i) an amino acid sequence having at least 70% (e.g., at least 80%, 90%, 95%, or 98%) identical to SEQ ID NO: 93;
j) an amino acid sequence having at least 70% (e.g., at least 80%, 90%, 95%, or 98%) identical to SEQ ID NO: 94;
k) an amino acid sequence having at least 70% (e.g., at least 80%, 90%, 95%, or 98%) identical to SEQ ID NO: 95;
l) an amino acid sequence having at least 70% (e.g., at least 80%, 90%, 95%, or 98%) identical to SEQ ID NO: 96;
m) an amino acid sequence having at least 70% (e.g., at least 80%, 90%, 95%, or 98%) identical to SEQ ID NO: 97;
n) an amino acid sequence having at least 70% (e.g., at least 80%, 90%, 95%, or 98%) identical to SEQ ID NO: 98;
o) an amino acid sequence having at least 70% (e.g., at least 80%, 90%, 95%, or 98%) identical to SEQ ID NO: 99;
p) an amino acid sequence having at least 70% (e.g., at least 80%, 90%, 95%, or 98%) identical to SEQ ID NO: 100;
q) an amino acid sequence having at least 70% (e.g., at least 80%, 90%, 95%, or 98%) identical to SEQ ID NO: 101;
r) an amino acid sequence having at least 70% (e.g., at least 80%, 90%, 95%, or 98%) identical to SEQ ID NO: 102; or
s) an amino acid sequence having at least 70% (e.g., at least 80%, 90%, 95%, or 98%) identical to SEQ ID NO: 103.

34. A method of eliminating or reducing the step of exogenously inducing chromosome doubling after embryo formation in the production of an inbred population, the method comprising crossing a doubled haploid inducer (DHI) line comprising an introduced genetic chromosome doubling agent with a second line and obtaining a doubled haploid progeny of the second line without a separate step of chromosome doubling due to exogenous treatment of a chromosome doubling agent, wherein the double haploid progeny does not comprise the introduced genetic chromosome doubling agent.

35. The method of claim 34, wherein the doubled haploid inducer comprises a loss-of-function mutation in a patatin-like phospholipase A2α gene.

36. The method of claim 35, wherein the loss-of-function mutation in the patatin-like phospholipase A2α gene is the MATRILINEAL (MATL) gene.

37. The method of claim 34, wherein the doubled haploid inducer (DHI) line expresses a marker gene.

38. The method of claim 37, wherein the marker gene is selected from a selectable marker, a reporter gene, a visible endogenous morphological marker, and combinations thereof.

39. The method of claim 38 wherein the selectable marker is selected from the group consisting of GUS, PMI, PAT, and combinations thereof.

40. The method of claim 38, wherein the reporter gene is selected from the group consisting of GFP, RFP, CFP, and combinations thereof.

41. The method of claim 38, wherein the visible endogenous morphological marker is selected from the group consisting of B1, R-nj, R1-scm, anthocyanin pigments, and combinations thereof.

42. The method of claim 34, wherein the introduced genetic chromosome doubling agent is a genetic chromosome doubling polypeptide.

43. The method of claim 42, wherein the genetic chromosome doubling polypeptide is selected from the group consisting of:
a) a polypeptide allowing replication of a genome without cell division;
b) a polypeptide destabilizing tubulin polymerization;
c) a polypeptide altering cell cycle regulation; and
d) combinations of the foregoing.

44. The method of claim 43, wherein the genetic chromosome doubling polypeptide allowing replication of the genome without cell division is selected from the group consisting of:
a) an amino acid sequence having at least 70% (e.g., at least 80%, 90%, 95%, or 98%) identical to SEQ ID NO: 24;
b) an amino acid sequence having at least 70% (e.g., at least 80%, 90%, 95%, or 98%) identical to SEQ ID NO: 25;
c) an amino acid sequence having at least 70% (e.g., at least 80%, 90%, 95%, or 98%) identical to SEQ ID NO: 26; or
d) an amino acid sequence having at least 70% (e.g., at least 80%, 90%, 95%, or 98%) identical to SEQ ID NO: 2.

45. The method of claim 43, wherein the genetic chromosome doubling polypeptide destabilizing tubulin polymerization is selected from the group consisting of:
a) an amino acid sequence having at least 70% (e.g., at least 80%, 90%, 95%, or 98%) identical to SEQ ID NO: 3; or
b) an amino acid sequence having at least 70% (e.g., at least 80%, 90%, 95%, or 98%) identical to SEQ ID NO: 28.

46. The method of claim 43, wherein the genetic chromosome doubling polypeptide altering cell cycle regulation is selected from the group consisting of:
a) an amino acid sequence having at least 70% (e.g., at least 80%, 90%, 95%, or 98%) identical to SEQ ID NO: 23;
b) an amino acid sequence having at least 70% (e.g., at least 80%, 90%, 95%, or 98%) identical to SEQ ID NO: 86;
c) an amino acid sequence having at least 70% (e.g., at least 80%, 90%, 95%, or 98%) identical to SEQ ID NO: 87;
d) an amino acid sequence having at least 70% (e.g., at least 80%, 90%, 95%, or 98%) identical to SEQ ID NO: 88;
e) an amino acid sequence having at least 70% (e.g., at least 80%, 90%, 95%, or 98%) identical to SEQ ID NO: 89;
f) an amino acid sequence having at least 70% (e.g., at least 80%, 90%, 95%, or 98%) identical to SEQ ID NO: 90;
g) an amino acid sequence having at least 70% (e.g., at least 80%, 90%, 95%, or 98%) identical to SEQ ID NO: 91;
h) an amino acid sequence having at least 70% (e.g., at least 80%, 90%, 95%, or 98%) identical to SEQ ID NO: 92;
i) an amino acid sequence having at least 70% (e.g., at least 80%, 90%, 95%, or 98%) identical to SEQ ID NO: 93;
j) an amino acid sequence having at least 70% (e.g., at least 80%, 90%, 95%, or 98%) identical to SEQ ID NO: 94;
k) an amino acid sequence having at least 70% (e.g., at least 80%, 90%, 95%, or 98%) identical to SEQ ID NO: 95;
l) an amino acid sequence having at least 70% (e.g., at least 80%, 90%, 95%, or 98%) identical to SEQ ID NO: 96;
m) an amino acid sequence having at least 70% (e.g., at least 80%, 90%, 95%, or 98%) identical to SEQ ID NO: 97;
n) an amino acid sequence having at least 70% (e.g., at least 80%, 90%, 95%, or 98%) identical to SEQ ID NO: 98;
o) an amino acid sequence having at least 70% (e.g., at least 80%, 90%, 95%, or 98%) identical to SEQ ID NO: 99;
p) an amino acid sequence having at least 70% (e.g., at least 80%, 90%, 95%, or 98%) identical to SEQ ID NO: 100;
q) an amino acid sequence having at least 70% (e.g., at least 80%, 90%, 95%, or 98%) identical to SEQ ID NO: 101;
r) an amino acid sequence having at least 70% (e.g., at least 80%, 90%, 95%, or 98%) identical to SEQ ID NO: 102; or
s) an amino acid sequence having at least 70% (e.g., at least 80%, 90%, 95%, or 98%) identical to SEQ ID NO: 103.

47. A method of maintaining a doubled haploid inducer (DHI) line comprising a genetic chromosome doubling agent, the method comprising:
a) providing a maintainer line comprising a heterologous maintainer construct, the maintainer construct comprising (i) a repressor or an inhibitor component for the genetic chromosome doubling agent, (ii) a pollen transmission prevention component, and (iii) a selectable marker component to identify seeds that contain the maintainer construct;
b) self-fertilizing the maintainer line having the maintainer construct and the genetic chromosome doubling agent;
c) identifying seeds containing the maintainer construct from the self-fertilization, wherein the maintainer construct is present in about 50% of the F1 seeds; and
d) growing the seeds containing the maintainer construct, thereby maintaining the DHI line in a diploid state for further seed increases or haploid induction crosses.

48. The method of claim 47, wherein the repressor or the inhibitor is a transcriptional repressor of the genetic chromosome doubling agent.

49. The method of claim 47, wherein the repressor or the inhibitor is an artificial micro RNA targeting the transcript of the genetic chromosome doubling agent.

50. The method of claim 47, wherein the selectable marker is a color-based marker suitable for seed sorting.

51. The method of claim 47, wherein the pollen transmission prevent component is a genetic element that reduces pollen viability thereby preventing the transmission of the maintainer construct through the pollen.

52. A doubled haploid inducer (DHI) maintainer line comprising a genetic chromosome doubling agent and a heterologous maintainer construct, the maintainer construct comprising (i) a repressor or an inhibitor component for the genetic chromosome doubling agent, (ii) a pollen transmission prevention component, and (iii) a selectable marker component to identify seeds that contain the maintainer construct.

53. The maintainer line of claim 52, wherein the repressor or the inhibitor is a transcriptional repressor of the genetic chromosome doubling agent.

54. The maintainer line of claim 52, wherein the repressor or the inhibitor is an artificial micro RNA targeting the transcript of the genetic chromosome doubling agent.

55. The maintainer line of claim 52, wherein the selectable marker is a color-based marker suitable for seed sorting.

56. The maintainer line of claim 52, wherein the pollen transmission prevent component is a genetic element that reduces pollen viability thereby preventing the transmission of the maintainer construct through the pollen.

57. The method of claim 1, wherein the first plant is a haploid inducer of a different plant species than the second plant.

58. The method of claim 1, wherein the first plant is used in a wide hybridization.

59. The method of claim 1, wherein the second plant species is corn, soybean, wheat, brassica, cotton or sorghum.

60. The method of claim 1, wherein the second plant species is a non-hybrid crop species.
